United States Patent Application Publication US 2011/0287957 A1 - sequence listing, part 3

SEQ ID NO: 1766 - DNA, 2009 bp, HOMO SAPIENS
acagctaaggaaagaagctggggcgcatgtttctgcccaaagccgggttttggccgaggtgactacacaccccctttcctggctcccataggctaagtgcctggcttcttgagaagcctgcttcttgagaacaaaaaagtgatttaaagcctcatgggagatgagcaatcctcaagacacaagcagaaaaagtcccagtgatacaggaagcgggttcaggaacctgctggttcctgatacataaatcagacagcctctgctgcatgacacgaagcttgcttctgcctggcatctgtgagcagctgccaggctccggccaggatcccttccttctcctcattggctgatggatcccaaggggctcctctccttgaccttcgtgctgtttctctccctggcttttggggcaagctacggaacaggtgggcgcatgatgaactgcccaaagattctccggcagttgggaagcaaagtgctgctgcccctgacatatgaaaggataaataagagcatgaacaaaagcatccacattgtcgtcacaatggcaaaatcactggagaacagtgtcgagaacaaaatagtgtctcttgatccatccgaagcaggccctccacgttatctaggagatcgctacaagttttatctggagaatctcaccctggggatacgggaaagcaggaaggaggatgagggatggtaccttatgaccctggagaaaaatgtttcagttcagcgcttttgcctgcagttgaggctttatgagcaggtctccactccagaaattaaagttttaaacaagacccaggagaacgggacctgcaccttgatactgggctgcacagtggagaagggggaccatgtggcttacagctggagtgaaaaggcgggcacccacccactgaacccagccaacagctcccacctcctgtccctcaccctcggcccccagcatgctgacaatatctacatctgcaccgtgagcaaccctatcagcaacaattcccagaccttcagcccgtggcccggatgcaggacagacccctcagaaacaaaaccatgggcagtgtatgctgggctgttagggggtgtcatcatgattctcatcatggtggtaatactacagttgagaagaagaggtaaaacgaaccattaccagacaacagtggaaaaaaaaagccttacgatctatgcccaagtccagaaaccaggtcctcttcagaagaaacttgactccttcccagctcaggacccttgcaccaccatatatgttgctgccacagagcctgtcccagagtctgtccaggaaacaaattccatcacagtctatgctagtgtgacacttccagagagctgacaccagagaccaacaaagggactttctgaaggaaaatggaaaaaccaaaatgaacactgaacttggccacaggccccaagtttcctctggcagacatgctgcacgtctgtacccttctcagatcaactccctggtgatgtttcttccacatacatctgtgaaatgaacaaggaagtgaggcttcccaagaatttagcttgctgtgcagtggctgcaggcgcagaacagagcgttacttgataacagcgttccatctttgtgttgtagcagatgaaatggacagtaatgtgagttcagactttgggcatcttgctcttggctggaactggataataaaaatcagactgaaagccaggacatctgagtacctatctcacacactggaccaccagtcacaaagtctggaaaagtttacattttggctatctttactttgttctgggagctgatcatgataacctgcagacctgatcaagcctctgtgcctcagtttctctctcaggataaagagtgaatagaggctgaagggtgaatttcttattatacataaaacactctgatattattgtataaaggaagctaagaatattattttatttgcaaaacccagaagctaaaaagtcaataaacagaaagaatgattttgaaaaaaaaa

SEQ ID NO: 1767 - DNA, 450 bp, HOMO SAPIENS
atgatgagctttacatgttttagcacatttaactttcacaggactctatccccattacaggtggggaaactgaggcacagtgctttcttcccacctccactgaccaggtcctgggggacccagggtacccgccatcccatcctgcctccctcgggagctgtgttcattgacttccatcacaccggcgcctcctcaaggggctcaatccagatgtctgctccagacctctccacagccctcagaggggtctgggatgggagtcctggccacgtgatactatcctgtatagccgagcagccaccaagtgggtgtgtgtgcactgcacctgtgtgcatgtgtgattgtgcctctgcatgtgtgcaggtgtgggcctcccaggctgagtgtctgtgtgtcagtgtcaggaggtgtgggtcagagcatgtgcgcatgtgtcctcgtgtgcagtga

SEQ ID NO: 1768 - DNA, 7802 bp, HOMO SAPIENS; identical to SEQ ID NO: 349

SEQ ID NO: 1769 - DNA, 2757 bp, HOMO SAPIENS
ccgcggccaccggggtcggctgggacagactgcgggcacgtccccttccagaggctttaactgaaaaatagaacccaggaaggtgtggacactgccagcggctgcagccgacttggaatgacctgggagacaaatacaacagcatggaagatgccaaagtctatgtggctaaagtggactgcacggcccactccgacgtgtgctccgcccagggggtgcgaggataccccaccttaaagcttttcaagccaggccaagaagctgtgaagtaccagggtcctcgggacttccagacactggaaaactggatgctgcagacactgaacgaggagccagtgacaccagagccggaagtggaaccgcccagtgcccccgagctcaagcaagggctgtatgagctctcagcaagcaactttgagctgcacgttgcacaaggcgaccactttatcaagttcttcgctccgtggtgtggtcactgcaaagccctggctccaacctgggagcagctggctctgggccttgaacattccgaaactgtcaagattggcaaggttgattgtacacagcactatgaactctgctccggaaaccaggttcgtggctatcccactcttctctggttccgagatgggaaaaaggtggatcagtacaagggaaagcgggatttggagtcactgagggagtacgtggagtcgcagctgcagcgcacagagactggagcgacggagaccgtcacgccctcagaggccccggtgctggcagctgagcccgaggctgacaagggcactgtgttggcactcactgaaaataacttcgatgacaccattgcagaaggaataaccttcatcaagttttatgctccatggtgtggtcattgtaagactctggctcctacttgggaggaactctctaaaaaggaattccctggtctggcgggggtcaagatcgccgaagtagactgcactgctgaacggaatatctgcagcaagtattcggtacgaggctaccccacgttattgcttttccgaggagggaagaaagtcagtgagcacagtggaggcagagaccttgactcgttacaccgctttgtcctgagccaagcgaaagacgaactttaggaacacagttggaggtcacctctcctgcccagctcccgcaccctgcgtttaggagttcagtcccacagaggccactgggttcccagtggtggctgttcagaaagcagaacatactaagcgtgaggtatcttctttgtgtgtgtgttttccaagccaacacactctacagattctttattaagttaagtttctctaagtaaatgtgtaactcatggtcactgtgtaaacattttcagtggcgatatatcccctttgaccttctcttgatgaaatttacatggtttcctttgagactaaaatagcgttgagggaaatgaaattgctggactatttgtggctcctgagttgagtgattttggtgaaagaaagcacatccaaagcatagtttacctgcccacgagttctggaaaggtggccttgtggcagtattgacgttcctctgatcttaaggtcacagttgactcaatactgtgttggtccgtagcatggagcagattgaaatgcaaaaacccacacctctggaagataccttcacggccgctgctggagcttctgttgctgtgaatacttctctcagtgtgagaggttagccgtgatgaaagcagcgttacttctgaccgtgcctgagtaagagaatgctgatgccataactttatgtgtcgatacttgtcaaatcagttactgttcaggggatccttctgtttctcacggggtgaaacatgtctttagttcctcatgttaacacgaagccagagcccacatgaactgttggatgtcttccttagaaagggtaggcatggaaaattccacgaggctcattctcagtatctcattaactcattgaaagattccagttgtatttgtcacctggggtgacaagaccagacaggctttcccaggcctgggtatccagggaggctctgcagccctgctgaagggccctaactagagttctagagtttctgattctgtttctcagtagtccttttagaggcttgctatacttggtctgcttcaaggaggtcgaccttctaatgtatgaagaatgggatgcatttgatctcaagaccaaagacagatgtcagtgggctgctctggccctggtgtgcacggctgtggcagctgttgatgccagtgtcctctaactcatgctgtccttgtgattaaacacctctatctcccttgggaataagcacatacaggcttaagctctaagatagataggtgtttgtccttttaccatcgagctacttcccataataaccactttgcatccaacactcttcacccacctcccatacgcaaggggatgtggatacttggcccaaagtaactggtggtaggaatcttagaaacaagaccacttatactgtctgtctgaggcagaagataacagcagcatctcgaccagcctctgccttaaaggaaatctttattaatcacgtatggttcacagataattctttttttaaaaaaacccaacctcctagagaagcacaactgtcaagagtcttgtacacacaacttcagctttgcatcacgagtcttgtattccaagaaaatcaaagtggtacaatttgtttgtttacactatgatactttctaaataaactctttttttttaaaaaaaaaaaaaaaa

SEQ ID NO: 1770 - DNA, 517 bp, HOMO SAPIENS
  misc_feature (184)..(184): n is a, c, g, or t
  misc_feature (425)..(426): n is a, c, g, or t
gtgtgtaagtaaggccttgtcctaaaaaaaaaaaaaaaaaatcagtctagtgaggaaaaaatgtaaataaacaaatgaatgagtacattttgcattctgagttatgcagaaagtgctttgcaacatagaggaaaaagccctaactgttgtggtggttgagagttgattggaaagcctcatggcnggctgagtcttgatggagcagtactttgcccagtggaaataagaagaaagcatatagaagttctccttatcctttggacttgcaatacacacaaaactttctggggctttctaaggaaattttatttcaagattctgctaggcaataactctccttccttaaattgaagggtaaggactctaagttctgctttttcttttctcactgaatttgcttaggtttttttttcgtttttgtttgnntttttttttttttcacctttctcactggtattgatcactttctcttccttagtaaagctccatttgcttctctcctaacctggacattata

SEQ ID NO: 1771 - DNA, 3249 bp, HOMO SAPIENS
atcacgtcgttgcctgggctgccgtccgcggaaatttgaaatggctgacgggtcgctgacgggcggcggtctggaggcagcggccatggcgccggagcgcacgggctgggcggtggagcaggagctggcgtctctggagaaaggtttgttccaagatgaagattcatgcagtgattgtagctaccgtgataaaccaggttctagtttacaaagttttatgccagaaggaaaaacctttttcccagaaattttccaaacaaatcaacttttgttctatgagcgattcagagcctatcaagattacattttagctgactgcaaggcctctgaggtacaggaattcacagctgagttcttggagaaggtccttgagccatctggatggcgggcagtctggcacactaatgtgttcaaggtgctggttgagatcacagatgtggactttgcagccttgaaggcagtggtgaggcttgctgaaccatacctctgtgactctcaagtgagcacttttaccatggagtgcatgaaggagctccttgatctgaaggagcatcggttgcccctgcaggagctgtgggtggtgtttgatgattcaggagtgtttgaccagacagcccttgcaattgagcatgtcagatttttctaccaaaacatttggaggagttgggatgaagaagaggaggatgaatacgattattttgtcagatgtgttgaacctcgattaagattgcattatgacattcttgaagaccgagttccatcaggacttattgttgactaccacaatctgttgtctcaatgtgaggagagttacaggaaatttttaaatctgagaagcagtttgtcaaattgtaactctgattccgagcaggaaaatatctccatggtggaagggttaaaattgtattcggagatggaacagttgaaacaaaagctgaaactcattgagaatcctttgttgaggtatgtgtttggttatcagaagaattctaacatccaagcaaagggtgtccgttccagcggtcagaagatcactcatgtggtctcctccaccatgatggctggtctcctgcggtccctgcttacggacaggctttgccaggagcctggtgaggaagaaagagaaattcagttccatagtgatccattgtctgctataaatgcctgcttcgaaggtgacactgttattgtttgtcctggccattatgtggtacatggcactttctccattgctgactccattgagttggaaggatatggcctaccagatgacattgtgatagaaaagaggggcaaaggcgacacttttgtggactgcactggtgctgatattaaaatctcaggcataaaatttgttcagcatgatgctgtagagggaatcttaattgttcaccgtggtaagactacgctggaaaactgtgtgctgcagtgtgagacgaccggagtcacagtgcggacatcagcagagtttctaatgaagaactcggatttatatggcgccaagggtgctggtatagaaatctaccctgggagtcagtgcaccctgagtgacaatgggatccatcactgcaaggaagggatcctcattaaggacttcttagatgaacattatgacattcccaagatatccatggtgaataatataatacataataatgaaggttatggtgttgtcttggtgaaacctacaatcttctctgacctgcaagaaaatgctgaagatggaactgaagaaaataaagcgcttaaaattcagacaagtggagagccagatgtggctgaaagagtggatctagaagagctgattgagtgtgcaactggtaaaatggagctttgtgcaagaactgacccttctgagcaagtcgagggaaattgtgaaattgtaaatgaactaattgctgcctccacacagaaaggccagataaagaagaaaaggttgagtgaactggggatcacgcaagctgatgacaacttaatgtcacaggagatgtttgttgggattgtggggaaccagttcaagtggaatgggaaaggtagttttggcacatttcttttctgactacagtgatgtaagtagatagcaaaatactggattttgcacatgctgccctaagaatcactgctgccattgtagtttgctgtattgtctgtattttatatttgattatttgggcttgagtgaaaggtagatttatttccatttgcaggtgttgcacataaaacactccctctttataagaaaaatcataaatgcatataaaatagaaaatatttggagattgcttatctgaaagtcttgctttcttatacacatggttctctcatattaagcctggtagtaactttttagtgtaattacctttagcacttcaaagacgaggaagtaaggaagggaatgcaagactagtgcataaaaatgcaataggtgtcatatgtacagcattcttcttagagttgccttttcatcccaattacagtgagtctgatttccatcctgtatttgcataatacttgtcttaaaataaaagcttttatgattgggaatttatctgcctaatcagacttattattgagacgtcaatgggacgcatttttctgttgagctatgcagtcgtcaaaacagcgatagacagcataggaggtttgaagcagaaatgaaatgtgttattcagagccaatgttgtacatagagcattttcactattgctgaatgggaatgattaaaaacaaggtatttttcgggccaggcggtggctcacgcttgtaatcgcagcactttgggaggctgaggcaggaggatcacttgagcccaggagttcaagactagcctaggcaacatagtgagaccctgtctctactaaaaataaatttaaaaaaaattagctgagtgtggtggtgcatgcatgtagttccagctactcaggaggctgaggctagaggatccttgagcccaggaggttgaggctgcagtgaggtgtgattgcgccactgcattccagcttgggcgacagagcgagacccagtctcaaaaaaaaaaaaaagtatttttctcttaccgttacagtattctgattatattactgacacagtcaaaatgattaactgtacaacctgtatctgctgggtgttcttgttatcatattgtaaaacagctttaaaaatatttatattttaaaaactgtatgtgacattaatatgcctaatgattaaaattatagtgatgaaataacaaaaaaaaaaaaaaaaaaa

SEQ ID NO: 1772 - DNA, 1604 bp, HOMO SAPIENS
cctccgcccgcccgcctgcctgcctgcccgcccgctcgctcgcccggcccgcgactcatgtcccgccgcaaggccggcagcgcgccccgccgagtagagcccgcgcccgccgccaacccagacgacgagatggaaatgcaggacctcgtcatcgaactcaagcccgagccagacgcgcagccccaacaggccccaaggctggggcccttctccccgaaggaggtgtcctcggcggggcggttcggcggcgaaccccaccactcccctggccccatgcccgccggggccgccctcctcgccctcggcccgcggaacccgtggaccctgtggacgccgttgaccccgaactatcccgaccgccagccctggaccgacaaacacccagatctgttgacctgcggccgctgcctgcagaccttcccgttggaggccatcactgccttcatggaccacaagaagctgggctgtcagctcttcagaggccccagccgcggccagggctcagaacgagaggagctgaaggccttgagctgcctgcgctgtggcaaacagttcacagtggcctggaagctgctgcgtcacgcccagtgggaccacggactgtccatctaccagacagaatcagaggccccggaggccccgctcctgggcctggccgaggtggctgcagccgtgtcggcagtggtggggccagcagctgaggccaagagcccccgtgcaagtggcagcggcctcacccggcggagccccacctgtcctgtgtgcaagaagaccctcagctccttcagcaacctcaaagtgcacatgcgctcacacacaggcgagcggccctatgcttgcgaccagtgtccctacgcctgcgcccagagcagcaagctcaaccgccacaagaagacccaccggcaggtgccgccccagagccccctcatggccgacaccagccaggagcaggcctctgcagcccctccggagccggctgtccatgctgctgcccccaccagcacccttccatgcagcggtggtgagggggctggagccgccgccacagcaggtgtccaggaacccggggctcctggcagtggggctcaagccggccctggtggagacacttggggagccatcaccacggaacaaagaactgaccctgcaaacagccagaaggcatcacccaaaaagatgcccaagtcagggggcaagagccgcgggcccgggggcagctgtgagttctgcgggaagcattttaccaacagcagcaacctgacggtgcaccggcgctcacacaccggggagcgcccctacacctgtgagttctgcaactacgcctgcgcccagagcagtaagctcaaccgccaccgccgcatgcacggcatgacgcctggcagcacccgcttcgagtgcccccactgccatgtgcccttcggcctgcgagccaccctggacaaacacctgcggcagaagcaccctgaggcggccggcgaggcctgagcccaggaaagcccccctcactgtccctggtaccgctgccaacacccattgacctcctcgtttttgcccgccttctccaagtaaattttcccttttatttaaaaaaaaaaaaaaaaaaa

SEQ ID NO: 1773 - DNA, 2664 bp, HOMO SAPIENS
gctgatgttttaagcagttagaggaggtggaagaagctcgactccctcttcttccccattatctgcccacaatcccctcctttggagctgctaatgattactaattcttaacattcgagttcaatctcctcccggagacaccctcccaggcgagggcactgcgactacactgaggttctgcccactcctgggcagcttcttagctgggtggcgaaaacaaaaatgccgcctaattggtcactggccctttctcatgaatgaaggaggtttctgttttaagaaataaagtgactcctcagccgttgattcactgcccacagggagattttgagcagaggcttcctaggctccgtagaaatttgcatacagcttccacttcctgcttcagagcctgttcttctacttacctgggcccggagaaggtggagggagacgagaagccgccgagagccgactaccctccgggcccagtctgtctgtccgtggtggatctaagaaactagaatgaaccgaagcattcctgtggaggttgatgaatcagaaccatacccaagtcagttgctgaaaccaatcccagaatattccccggaagaggaatcagaaccacctgctccaaatataaggaacatggcacccaacagcttgtctgcacccacaatgcttcacaattcctccggagacttttctcaagctcactcaaccctgaaacttgcaaatcaccagcggcctgtatcccggcaggtcacctgcctgcgcactcaagttctggaggacagtgaagacagtttctgcaggagacacccaggcctgggcaaagctttcccttctgggtgctctgcagtcagcgagcctgcgtctgagtctgtggttggagccctccctgcagagcatcagttttcatttatggaaaaacgtaatcaatggctggtatctcagctttcagcggcttctcctgacactggccatgactcagacaaatcagaccaaagtttacctaatgcctcagcagactccttgggcggtagccaggagatggtgcaacggccccagcctcacaggaaccgagcaggcctggatctgccaaccatagacacgggatatgattcccagccccaggatgtcctgggcatcaggcagctggaaaggcccctgcccctcacctccgtgtgttacccccaggacctccccagacctctcaggtccagggagttccctcagtttgaacctcagaggtatccagcatgtgcacagatgctgcctcccaatctttccccacatgctccatggaactatcattaccattgtcctggaagtcccgatcaccaggtgccatatggccatgactaccctcgagcagcctaccagcaagtgatccagccggctctgcctgggcagcccctgcctggagccagtgtgagaggcctgcaccctgtgcagaaggttatcctgaattatcccagcccctgggaccacgaagagaggcccgcacagagagactgctcctttccggggcttccaaggcaccaggaccagccacatcaccagccacctaatagagctggtgctcctggggagtccttggagtgccctgcagagctgagaccacaggttccccagcctccgtccccagctgctgtgcctagaccccctagcaaccctccagccagaggaactctaaaaacaagcaatttgccagaagaattgcggaaagtctttatcacttattcgatggacacagctatggaggtggtgaaattcgtgaactttttgttggtaaatggcttccaaactgcaattgacatatttgaggatagaatccgaggcattgatatcattaaatggatggagcgctaccttagggataccgtgatgataatcgtagcaatcagccccaaatacaaacaggacgtggaaggcgctgagtcgcagctggacgaggatgagcatggcttacatactaagtacattcatcgaatgatgcagattgagttcataaaacaaggaagcatgaatttcagattcatccctgtgctcttcccaaatgctaagaaggagcatgtgcccacctggcttcagaacactcatgtctacagctggcccaagaataaaaaaaacatcctgctgcggctgctgagagaggaagagtatgtggctcctccacgggggcctctgcccacccttcaggtggttcccttgtgacaccgttcatccccagatcactgaggccaggccatgtttggggccttgttctgacagcattctggctgaggctggtcggtagcactcctggctggtttttttctgttcctccccgagaggccctctggcccccaggaaacctgttgtgcagagctcttccccggagacctccacacaccctggctttgaagtggagtctgtgactgctctgcattctctgcttttaaaaaaaccattgcaggtgccagtgtcccatatgttcctcctgacagtttgatgtgtccattctgggcctctcagtgcttagcaagtagataatgtaagggatgtggcagcaaatggaaatgactacaaacactctcctatcaatcacttcaggctacttttatgagttagccagatgcttgtgtatcctcagaccaaactgattcatgtacaaataataaaatgtttactcttttgtaa

SEQ ID NO: 1774 - DNA, 1259 bp, HOMO SAPIENS
ccggagctgggttgctcctgctcccgtctccaagtcctggtacctccttcaagctgggagagggctctagtccctggttctgaacactctggggttctcgggtgcaggccgccatgagcaaacggaaggcgccgcaggagactctcaacgggggaatcaccgacatgctcacagaactcgcaaactttgagaagaacgtgagccaagctatccacaagtacaatgcttacagaaaagcagcatctgttatagcaaaatacccacacaaaataaagagtggagctgaagctaagaaattgcctggagtaggaacaaaaattgctgaaaagattgatgagtttttagcaactggaaaattacgtaaactggaaaagattcggcaggatgatacgagttcatccatcaatttcctgactcgagttagtggcattggtccatctgctgcaaggaagtttgtagatgaaggaattaaaacactagaagatctcagaaaaaatgaagataaattgaaccatcatcagcgaattgggctgaaatattttggggactttgaaaaaagaattcctcgtgaagagatgttacaaatgcaagatattgtactaaatgaagttaaaaaagtggattctgaatacattgctacagtctgtggcagtttcagaagaggtgcagagtccagtggtgacatggatgttctcctgacccatcccagcttcacttcagaatcaaccaaacagccaaaactgttacatcaggttgtggagcagttacaaaaggttcattttatcacagataccctgtcaaagggtgagacaaagttcatgggtgtttgccagcttcccagtaaaaatgatgaaaaagaatatccacacagaagaattgatatcaggttgatacccaaagatcagtattactgtggtgttctctatttcactgggagtgatattttcaataagaatatgagggctcatgccctagaaaagggtttcacaatcaatgagtacaccatccgtcccttgggagtcactggagttgcaggagaacccctgccagtggatagtgaaaaagacatctttgattacatccagtggaaataccgggaacccaaggaccggagcgaatgaggcctgtatcctccctggcagacacaacccaataggagtcttaatttatttcttaacctttgctatgtaagggtctttggtgtttttaaatgattgtttcttcttcatgcttttgcttgcaatgtagtcaataaaacc

SEQ ID NO: 1775 - DNA, 2732 bp, HOMO SAPIENS
cccgcctcctggtaggagggggtttccgcttccggcagcagcggctgcagcctcgctctggtccctgcggctggcggccgagccgtgtgtctcctcctccatcgccgccatattgtctgtgtgagcagaggggagagcggccgccgccgctgccgcttccaccacagtttgaagaaaacaggtctgaaacaaggtcttacccccagctgcttctgaacacagtgactgccagatctccaaacatcaagtccagctttgtccgccaacctgtctgacatgtcgggacccgtgccaagcagggccagagtttacacagatgttaatacacacagacctcgagaatactgggattacgagtcacatgtggtggaatggggaaatcaagatgactaccagctggttcgaaaattaggccgaggtaaatacagtgaagtatttgaagccatcaacatcacaaataatgaaaaagttgttgttaaaattctcaagccagtaaaaaagaagaaaattaagcgtgaaataaagattttggagaatttgagaggaggtcccaacatcatcacactggcagacattgtaaaagaccctgtgtcacgaacccccgccttggtttttgaacacgtaaacaacacagacttcaagcaattgtaccagacgttaacagactatgatattcgattttacatgtatgagattctgaaggccctggattattgtcacagcatgggaattatgcacagagatgtcaagccccataatgtcatgattgatcatgagcacagaaagctacgactaatagactggggtttggctgagttttatcatcctggccaagaatataatgtccgagttgcttcccgatacttcaaaggtcctgagctacttgtagactatcagatgtacgattatagtttggatatgtggagtttgggttgtatgctggcaagtatgatctttcggaaggagccatttttccatggacatgacaattatgatcagttggtgaggatagccaaggttctggggacagaagatttatatgactatattgacaaatacaacattgaattagatccacgtttcaatgatatcttgggcagacactctcgaaagcgatgggaacgctttgtccacagtgaaaatcagcaccttgtcagccctgaggccttggatttcctggacaaactgctgcgatatgaccaccagtcacggcttactgcaagagaggcaatggagcacccctatttctacactgttgtgaaggaccaggctcgaatgggttcatctagcatgccagggggcagtacgcccgtcagcagcgccaatatgatgtcagggatttcttcagtgccaaccccttcaccccttggacctctggcaggctcaccagtgattgctgctgccaacccccttgggatgcctgttccagctgccgctggcgctcagcagtaacggccctatctgtctcctgatgcctgagcagaggtgggggagtccaccctctccttgatgcagcttgcgcctggcggggaggggtgaaacacttcagaagcaccgtgtctgaaccgttgcttgtggatttatagtagttcagtcataaaaaaaaaattataataggctgattttcttttttctttttttttttaactcgaacttttcataactcaggggattccctgaaaaattacctgcaggtggaatatttcatggacaaatttttttttctcccctcccaaatttagttcctcatcacaaaagaacaaagataaaccagcctcaatcccggctgctgcatttaggtggagacttcttcccattcccaccattgttcctccaccgtcccacactttagggggttggtatctcgtgctcttctccagagattacaaaaatgtagcttctcaggggaggcaggaagaaaggaaggaaggaaagaaggaagggaggacccaatctataggagcagtggactgcttgctggtcgcttacatcactttactccataagcgcttcagtggggttatcctagtggctcttgtggaagtgtgtcttagttacatcaagatgttgaaaatctacccaaaatgcagacagatactaaaaacttctgttcagtaagaatcatgtcttactgatctaaccctaaatccaactcatttatacttttatttttagttcagtttaaaatgttgataccttccctcccaggctccttaccttggtcttttccctgttcatctcccaacatgctgtgctccatagctggtaggagagggaaggcaaaatctttcttagttttctttgtcttggccattttgaattcatttagttactgggcataacttactgctttttacaaaagaaacaaacattgtctgtacaggtttcatgctagagctaatgggagatgtggccacactgacttccattttaagctttctaccttcttttcctccgaccgtccccttccctcacatgccatccagtgagaagacctgctcctcagtcttgtaaatgtatcttgagaggtaggagcagagccactatctccattgaagctgaaatggtagacctgtaattgtgggaaaactataaactctcttgttacagccccgccaccccttgctgtgtgtatatatataatactttgtccttcatatgtgaaagatccagtgttggaattctttggtgtaaataaacgtttggttttatttatcaaaaaaaaaaaaaaa

SEQ ID NO: 1776 - DNA, 3848 bp, HOMO SAPIENS
gcagtcaggccgttgtgcgcaggcgcagaggcggcggcggcggcggcggcggcggatgtttacggcggccgaggttggagcggcgctgctcggccgcggacacacgagggacgcgcccgaggagctgcaggtggcagcccaggcggtccgaacccgtcggccggccgagcctggagtattgcctaagtgtaatcttgaacatgggcggtgctgtgagtgctggtgaagacaatgatgagctgatagataatttgaaagaagcacagtatatccggactgagctggtagagcaggctttcagagctatcgatcgtgcagactattatcttgaagaatttaaagaaaatgcttataaagacttggcatggaagcatggaaacattcacctctcagccccgtgcatctactcggaggtgatggaagccctagatctgcagcctggactctcgtttctgaacctgggcagtggcactgggtatctcagctccatggtgggcctcattctaggtccttttggtgtgaaccatggggtggaacttcactcagatgtgatagagtatgcaaagcagaaactggacttcttcatcagaacaagtgatagttttgacaagtttgacttctgtgaaccttcctttgttactgggaattgcctggagatttctccggattgttctcagtatgatcgtgtatactgtggggctggcgtgcagaaagagcatgaagagtacatgaagaatcttctcaaagtgggagggatccttgtcatgccactggaagagaagccctgccattcagagtcaggaaaatcaagacttgtccagttaccaccagtggcagttcgcagcctccaggacttggctcgcatcgccatccggggcaccattaaaaagattattcatcaggaaactgtgagcaaaaacggaaacggactaaagaacacccccaggtttaaacgaaggagagttcgccgccgtcgaatggaaacgattgtctttttggacaaagaagtctttgccagtcggatttccaacccctcagatgacaacagctgtgaagacttggaagaggaacggagggaagaagaagagaagaccccgccggaaacaaagccagaccccccagtgaacttcctacgccagaaggtcctgagcctccctctgccagatcccctgaaatactacttgctttattacagagaaaaataagtctcctgtttgaaagggggaaataggaagagcagattgctgagtgtgaagttcgtgctgcctgtgtgctgttgaagggtcacctggaggcagacgttgtggggaagggaactgctgggctcatccacaccatggttttcttctagttcctgattgacctctaaaattctattcagttgtatgatttgtttacatagttccacaagaccttcattgcatagaagattgttttcccaaagtggagagaatcttcatagagaaaaagagaaggctgtttctttttcggctctgacgaaacactgaagtctgcgtaagagagactgtttgatgaccgtccctcatgcaacatgcacggtactcactaaaaatgaaaactgaagtggaaactaacctgtgttgcttataaagtgtgaaagcacaagcttataaatgtataaaatcttttctgggtgtgacgcacctgcgtccaagtttgaatttttatgatatgtaccacttaattactggcactgagtatcactgaatttcttagttttctagtggggaaacattattgagaagccctcccttattttaagtaagttgattaaatcttatgtgagttgccagttgtaatttttcaaaggaaaaattttgatggggtggaggaatgaattgccagataatctttctggaattccgagagaattccaaagagggtttttttttttttttttaggacatcttttgatacctttaaaagaaccactgtcaagtaatccttaaaagaatatcttggaaaaggaaacagattttttcctgtgtgtaagcaataagtgaagttacatttgccctaaccctagggatgattctttacccagttttaaagcccatcatggtattctaaggtgttgacaccctccatcctcagagcaggtcgaaaatattaaatagactggggactctatgatgggcagcctgtgctttttgacttcagtttgctatttttctgtgatcacattagtactgattcatagattctatcttttataattctggagaaaaagatttgttagttttgtaatttttttgtaagaccaaatgtatgtattttagtagctccattgcatgagaagagtgtaactcacactgacttgtgatatcagccttctctgggccttgtgtgtggagagctttctatcttaccaagtggtagggctaaaagaacaacagcctttttggtagtcacatagcagaatgatcagagttacattgcttattccaaaacattggttctttttaaaacatttttttttacccaaagaaaagaataatagaaattactaacaataaatataaattcagagtgttgatataggattcagtatccagagtttatttttaatcttaatcctcagcttcttgggagttgctgggcttcagtgtctctgtggtttcaccagcttagcttgagctctggttattttggatcttttctgctttttttaagtaactgagtcatttttaccacacagtccagtttgcatgtatagctaggaaacatgtattgctctagattgggcagtttaagtcattttaaagaaagttagttcatagttgttgccttttaactcatagtcaagcttcagtctttcaaagagaaatgtgtgattttcatttacttgctgatattttgtagtttggagatccttgtgggcattattctaactgatacgtagacacttacttggaaatttttggacattatattaaatgagtgctatctgtgaaattggttatattaggtggcttgactaatgttttttctataattgtatatggactgcatttttaaaaaaaccgcatttgcctttatgctagattgtaaaaaattatattagaatgcataagacatgtttttccttcatatgctagacttttcctagcatttcgtatttctgtgttgtcagtgtgtgatttttaaaccggaatttggtttaaaaaaaatctggtggtaatatatgtgagaaatactttggtgtttaccttatgaaaataaaggattgtaagtaaagtttcctgcgcaccttataccagaattcagtataatacactactttctgttttcaaacagataaatcataatatagtctgtattatctgtaagatctgtcttgtaaaccacattcttgacaactatttgcttttgagtagtttgtattttaatatgtgacttttgtcttgaaaagtagtaaagccatagacttgtgcaaaacaagtttcaagtttatagatattaagtttgtaatgtgagcatcaaatgtgtatgtaaaaatactttttaccagtctggaacttgggaaaatccagggaatttgaaacatagattttaatgagctggtaaacacaaatcatgtcaataaaggtagtcaggatattttatccttagcattgcttctgcatcctgtgtaggattccaattcttgaatatgttcttttcaaaatcttaagaaaagaaccttttttctttattaacatcatgtgtttactttcagcaaatatttgtattactgcttgattctgtgacagtcacaatagatgtagagaaggcattatttttcattaataaatgtgaaattggaatggaaaaaaaaaaaaaaaaaa

SEQ ID NO: 1777 - DNA, 2345 bp, HOMO SAPIENS; identical to SEQ ID NO: 1704

SEQ ID NO: 1778 - DNA, 16872 bp, HOMO SAPIENS
gaggtgcgcgcgcccgcgccgatgtgtgtgagtgcgtgtcctgctcgctccatgttgccgcctctcccggtacctgctgctgctcccggggctgcgggaaatgcgagaggctgagccggggaggaggaacccgagcagcagcggcggcggcggcggccgcggcggcgggagccccccaggaggaggaccgggatccatgtgtctttcctggtgactaggatgtcgtcggaggaggacaagagcgtggagcagccgcagccgccgccaccaccccccgaggagcctggagccccggccccgagccccgcagccgcagacaaaagacctcggggccggcctcgcaaagatggcgcttcccctttccagagagccagaaagaaacctcgaagtagggggaaaactgcagtggaagatgaggacagcatggatgggctggagacaacagaaacagaaacgattgtggaaacagaaatcaaagaacaatctgcagaagaggatgctgaagcagaagtggataacagcaaacagctaattccaactcttcagcgatctgtgtctgaggaatcggcaaactccctggtctctgttggtgtagaagccaaaatcagtgaacagctctgcgctttttgttactgtggggaaaaaagttccttaggacaaggagacttaaaacaattcagaataacgcctggatttatcttgccatggagaaaccaaccttctaacaagaaggacattgatgacaacagcaatggaacctatgagaaaatgcaaaactcagcaccacgaaaacaaagaggacagagaaaagaacgatctcctcagcagaatatagtatcttgtgtaagtgtaagcacccagacagcttcagatgatcaagctggtaaactgtgggatgaactcagtctggttgggcttccagatgccattgatatccaagccttatttgattctacaggcacttgttgggctcatcaccgttgtgtggagtggtcactaggagtatgccagatggaagaaccattgttagtgaacgtggacaaagctgttgtctcagggagcacagaacgatgtgcattttgtaagcaccttggagccactatcaaatgctgtgaagagaaatgtacccagatgtatcattatccttgtgctgcaggagccggcacctttcaggatttcagtcacatcttcctgctttgtccagaacacattgaccaagctcctgaaagatcgaaggaagatgcaaactgtgcagtgtgcgacagcccgggagacctcttagatcagttcttttgtactacttgtggtcagcactatcatggaatgtgcctggatatagcggttactccattaaaacgtgcaggttggcaatgtcctgagtgcaaagtgtgccagaactgcaaacaatcgggagaagatagcaagatgctagtgtgtgatacgtgtgacaaagggtatcatactttttgtcttcaaccagttatgaaatcagtaccaaccaatggctggaaatgcaaaaattgcagaatatgtatagagtgtggcacacggtctagttctcagtggcaccacaattgcctgatatgtgacaattgttaccaacagcaggataacttatgtcccttctgtgggaagtgttatcatccagaattgcagaaagacatgcttcattgtaatatgtgcaaaaggtgggttcacctagagtgtgacaaaccaacagatcatgaactggatactcagctcaaagaagagtatatctgcatgtattgtaaacacctgggagctgagatggatcgtttacagccaggtgaggaagtggagatagctgagctcactacagattataacaatgaaatggaagttgaaggccctgaagatcaaatggtattctcagagcaggcagctaataaagatgtcaacggtcaggagtccactcctggaattgttccagatgcggttcaagtccacactgaagagcaacagaagagtcatccctcagaaagtcttgacacagatagtcttcttattgctgtatcatcccaacatacagtgaatactgaattggaaaaacagatttctaatgaagttgatagtgaagacctgaaaatgtcttctgaagtgaagcatatttgtggcgaagatcaaattgaagataaaatggaagtgacagaaaacattgaagtcgttacacaccagatcactgtgcagcaagaacaactgcagttgttagaggaacctgaaacagtggtatccagagaagaatcaaggcctccaaaattagtcatggaatctgtcactcttccactagaaaccttagtgtccccacatgaggaaagtatttcattatgtcctgaggaacagttggttatagaaaggctacaaggagaaaaggaacagaaagaaaattctgaactttctactggattgatggactctgaaatgactcctacaattgagggttgtgtgaaagatgtttcataccaaggaggcaaatctataaagttatcatctgagacagagtcatcattttcatcatcagcagacataagcaaggcagatgtgtcttcctccccaacaccttcttcagacttgccttcgcatgacatgctgcataattacccttcagctcttagttcctctgctggaaacatcatgccaacaacttacatctcagtcactccaaaaattggcatgggtaaaccagctattactaagagaaaattttctcctggtagacctcggtccaaacagggggcttggagtacccataatacagtgagcccaccttcctggtccccagacatttcagaaggtcgggaaatttttaaacccaggcagcttcctggcagtgccatttggagcatcaaagtgggccgtgggtctggatttccaggaaagcggagacctcgaggtgcaggactgtcggggcgaggtggccgaggcaggtcaaagctgaaaagtggaatcggagctgttgtattacctggggtgtctactgcagatatttcatcaaataaggatgatgaagaaaactctatgcacaatacagttgtgttgttttctagcagtgacaagttcactttgaatcaggatatgtgtgtagtttgtggcagttttggccaaggagcagaaggaagattacttgcctgttctcagtgtggtcagtgttaccatccatactgtgtcagtattaagatcactaaagtggttcttagcaaaggttggaggtgtcttgagtgcactgtgtgtgaggcctgtgggaaggcaactgacccaggaagactcctgctgtgtgatgactgtgacataagttatcacacctactgcctagaccctccattgcagacagttcccaaaggaggctggaagtgcaaatggtgtgtttggtgcagacactgtggagcaacatctgcaggtctaagatgtgaatggcagaacaattacacacagtgcgctccttgtgcaagcttatcttcctgtccagtctgctatcgaaactatagagaagaagatcttattctgcaatgtagacaatgtgatagatggatgcatgcagtttgtcagaacttaaatactgaggaagaagtggaaaatgtagcagacattggttttgattgtagcatgtgcagaccctatatgcctgcgtctaatgtgccttcctcagactgctgtgaatcttcacttgtagcacaaattgtcacaaaagtaaaagagctagacccacccaagacttatacccaggatggtgtgtgtttgactgaatcagggatgactcagttacagagcctcacagttacagttccaagaagaaaacggtcaaaaccaaaattgaaattgaagattataaatcagaatagcgtggccgtccttcagacccctccagacatccaatcagagcattcaagggatggtgaaatggatgatagtcgagaaggagaacttatggattgtgatggaaaatcagaatctagtcctgagcgggaagctgtggatgatgaaactaagggagtggaaggaacagatggtgtcaaaaagagaaaaaggaaaccatacagaccaggtattggtggatttatggtgcggcaaagaagtcgaactgggcaagggaaaaccaaaagatctgtgatcagaaaagattcctcaggctctatttccgagcagttaccttgcagagatgatggctggagtgagcagttaccagatactttagttgatgaatctgtttctgttactgaaagcactgaaaaaataaagaagagataccgaaaaaggaaaaataagcttgaagaaactttccctgcctatttacaagaagctttctttggaaaagatcttctagatacaagtagacaaagcaagataagtttagataatctgtcagaagatggagctcagcttttatataaaacaaacatgaacacaggtttcttggatccttccttagatccactacttagttcatcctcggctccaacaaaatctggaactcacggtcctgctgatgacccattagctgatatttctgaagttttaaacacagatgatgacattcttggaataatttcagatgatctagcaaaatcagttgatcattcagatattggtcctgtcactgatgatccttcctctttgcctcagccaaatgtcaatcagagttcacgaccattaagtgaagaacagctagatgggatcctcagtcctgaactagacaaaatggtcacagatggagcaattcttggaaaattatataaaattccagagcttggcggaaaagatgttgaagacttatttacagctgtacttagtcctgcgaacactcagccaactccattgccacagcctcccccaccaacacagctgttgccaatacacaatcaggatgctttttcacggatgcctctcatgaatggccttattggatccagtcctcatctcccacataattctttgccacctggaagcggactgggaactttctctgcaattgcacaatcctcttatcctgatgccagggataaaaattcagcctttaatccaatggcaagtgatcctaacaactcttggacatcatcagctcccactgtggaaggagaaaatgacacaatgtcgaatgcccagagaagcacgcttaagtgggagaaagaggaggctctgggtgaaatggcaactgttgccccagttctctacaccaatattaatttccccaacttaaaggaagaattccctgattggactactagagtgaagcaaattgccaaattgtggagaaaagcaagctcacaagaaagagcaccatatgtgcaaaaagccagagataacagagctgctttacgcattaataaagtacagatgtcaaatgattccatgaaaaggcagcaacagcaagatagcattgatcccagctctcgtattgattcggagctttttaaagatcctttaaagcaaagagaatcagaacatgaacaggaatggaaatttagacagcaaatgcgtcagaaaagtaagcagcaagctaaaattgaagccacacagaaacttgaacaggtgaaaaatgagcagcagcagcagcaacaacagcaatttggttctcagcatcttctggtgcagtctggttcagatacaccaagtagtgggatacagagtcccttgacacctcagcctggcaatggaaatatgtctcctgcacagtcattccataaagaactgtttacaaaacagccacccagtacccctacgtctacatcttcagatgatgtgtttgtaaagccacaagctccacctcctcctccagccccatcccggattcccatccaggatagtctttctcaggctcagacttctcagccaccctcaccgcaagtgttttcacctgggtcctctaactcacgaccaccatctccaatggatccatatgcaaaaatggttggtacccctcgaccacctcctgtgggccatagtttttccagaagaaattctgctgcaccagtggaaaactgtacacctttatcatcggtatctaggccccttcaaatgaatgagacaacagcaaataggccatcccctgtcagagatttatgttcttcttccacgacaaataatgacccctatgcaaaacctccagacacacctaggcctgtgatgacagatcaatttcccaaatccttgggcctatcccggtctcctgtagtttcagaacaaactgcaaaaggccctatagcagctggaaccagtgatcactttactaaaccatctcctagggcagatgtgtttcaaagacaaaggatacctgactcatatgcacgacccttgttgacacctgcacctcttgatagtggtcctggaccttttaagactccaatgcaacctcctccatcctctcaggatccttatggatcagtgtcacaggcatcaaggcgattgtctgttgacccttatgaaaggcctgctttgacaccaagacctatagataatttttctcataatcagtcaaatgatccatatagtcagcctccccttaccccacatccagcagtgaatgaatcttttgcccatccttcaagggctttttcccagcctggaaccatatcaaggccaacatctcaggacccatactcccaacccccaggaactccacgacctgttgtagattcttattcccaatcttcaggaacagctaggtccaatacagacccttactctcaacctcctggaactccccggcctactactgttgacccatatagtcagcagccccaaaccccaagaccatctacacaaactgacttgtttgttacacctgtaacaaatcagaggcattctgatccatatgctcatcctcctggaacaccaagacctggaatttctgtcccttactctcagccaccagcaacaccaaggccaaggatttcagagggttttactaggtcctcaatgacaagaccagtcctcatgccaaatcaggatcctttcctgcaagcagcacaaaaccgaggaccagctttacctggcccgttggtaaggccacctgatacatgttcccagacacctaggccccctggacctggtctttcagacacatttagccgtgtttccccatctgctgcccgtgatccctatgatcagtctccaatgactccaagatctcagtctgactcttttggaacaagtcaaactgcccatgatgttgctgatcagccaaggcctggatcagaggggagcttctgtgcatcttcaaactctccaatgcactcccaaggccagcagttctctggtgtctcccaacttcctggacctgtgccaacttcaggagtaactgatacacagaatactgtaaatatggcccaagcagatacagagaaattgagacagcggcagaagttacgtgaaatcattctccagcagcaacagcagaagaagattgcaggtcgacaggagaaggggtcacaggactcacccgcagtgcctcatccagggcctcttcaacactggcaaccagagaatgttaaccaggctttcaccagacccccacctccctatcctgggaacattaggtctcctgttgcccctcctttaggacctagatatgctgttttcccaaaagatcagcgtggaccctatcctcctgatgttgctagtatggggatgagacctcatggatttagatttggatttccaggaggtagtcatggtaccatgccgagtcaagagcgcttccttgtgcctcctcagcaaatacagggatctggagtttctccacagctaagaagatcagtatctgtagatatgcctaggcctttaaataactcacaaatgaataatccagttggacttcctcagcatttttcaccacagagcttgccagttcagcagcacaacatactgggccaagcatatattgaactgagacatagggctcctgacggaaggcaacggctgcctttcagtgctccacctggcagcgttgtagaggcatcttctaatctgagacatggaaacttcattccccggccagactttccgggccctagacacacagaccccatgcgacgacctccccagggtctacctaatcagctacctgtgcacccagatttggaacaagtgccaccatctcaacaagagcaaggtcattctgtccattcatcttctatggtcatgaggactctgaaccatccactaggtggtgaattttcagaagctcctttgtcaacatctgtaccgtctgaaacaacgtctgataatttacagataaccacccagccttctgatggtctagaggaaaaacttgattctgatgacccttctgtgaaggaactggatgttaaagaccttgagggggttgaagtcaaagacttagatgatgaagatcttgaaaacttaaatttagatacagaggatggcaaggtagttgaattggatactttagataatttggaaactaatgatcccaacctggatgacctcttaaggtcaggagagtttgatatcattgcatatacagatccagaacttgacatgggagataagaaaagcatgtttaatgaggaactagaccttccaattgatgataagttagataatcagtgtgtatctgttgaaccaaaaaaaaaggaacaagaaaacaaaactctggttctctctgataaacattcaccacagaaaaaatccactgttaccaatgaggtaaaaacggaagtactgtctccaaattctaaggtggaatccaaatgtgaaactgaaaaaaatgatgagaataaagataatgttgacactccttgctcacaggcttctgctcactcagacctaaatgatggagaaaagacttctttgcatccttgtgatccagatctatttgagaaaagaaccaatcgagaaactgctggccccagtgcaaatgtcattcaggcatccactcaactacctgctcaagatgtaataaactcttgtggcataactggatcaactccagttctctcaagtttacttgctaatgagaaatctgataattcagacattaggccatcggggtctccaccaccaccaactctgccggcctccccatccaatcatgtgtcaagtttgcctcctttcatagcaccgcctggccgtgttttggataatgccatgaattctaatgtgacagtagtctctagggtaaaccatgttttttctcagggtgtgcaggtaaacccagggctcattccaggtcaatcaacagttaaccacagtctggggacaggaaaacctgcaactcaaactgggcctcaaacaagtcagtctggtaccagtagcatgtctggaccccaacagctaatgattcctcaaacattagcacagcagaatagagagaggccccttcttctagaagaacagcctctacttctacaggatcttttggatcaagaaaggcaagaacagcagcagcaaagacagatgcaagccatgattcgtcagcgatcagaaccgttcttccctaatattgattttgatgcaattacagatcctataatgaaagccaaaatggtggcccttaaaggtataaataaagtgatggcacaaaacaatctgggcatgccaccaatggtgatgagcaggttcccttttatgggccaggtggtaactggaacacagaacagtgaaggacagaaccttggaccacaggccattcctcaggatggcagtataacacatcagatttctaggcctaatcctccaaattttggtccaggctttgtcaatgattcacagcgtaagcagtatgaagagtggctccaggagacccaacagctgcttcaaatgcagcagaagtatcttgaagaacaaattggtgctcacagaaaatctaagaaggccctttcagctaaacaacgtactgccaagaaagctgggcgtgaatttccagaggaagatgcagaacaactcaagcatgttactgaacagcaaagcatggttcagaaacagctagaacagattcgtaaacaacagaaagaacatgctgaattgattgaagattatcggatcaaacagcagcagcaatgtgcaatggccccacctaccatgatgcccagtgtccagccccagccacccctaattccaggtgccactccacccaccatgagccaacccacctttcccatggtgccacagcagcttcagcaccagcagcacacaacagttatttctggccatactagccctgttagaatgcccagtttacctggatggcaacccaacagtgctcctgcccacctgcccctcaatcctcctagaattcagcccccaattgcccagttaccaataaaaacttgtacaccagccccagggacagtctcaaatgcaaatccacagagtggaccaccacctcgggtagaatttgatgacaacaatccctttagtgaaagttttcaagaacgggaacgtaaggaacgtttacgagaacagcaagagagacaacggatccaactcatgcaggaggtagatagacaaagagctttgcagcagaggatggaaatggagcagcatggtatggtgggctctgagataagtagtagtaggacatctgtgtcccagattcccttctacagttccgacttaccttgtgattttatgcaacctctaggaccccttcagcagtctccacaacaccaacagcaaatggggcaggttttacagcagcagaatatacaacaaggatcaattaattcaccctccacccaaactttcatgcagactaatgagcgaaggcaggtaggccctccttcatttgttcctgattcaccatcaatccctgttggaagcccaaatttttcttctgtgaagcagggacatggaaatctttctgggaccagcttccagcagtccccagtgaggccttcttttacacctgctttaccagcagcacctccagtagctaatagcagtctcccatgtggccaagattctactataacccatggacacagttatccgggatcaacccaatcgctcattcagttgtattctgatataatcccagaggaaaaagggaaaaagaaaagaacaagaaagaagaaaagagatgatgatgcagaatccaccaaggctccatcaactccccattcagatataactgccccaccgactccaggcatctcagaaactacctctactcctgcagtgagcacacccagtgagcttcctcaacaagccgaccaagagtcggtggaaccagtcggcccatccactcccaatatggcagcaggccagctatgtacagaattagagaacaaactgcccaatagtgatttctcacaagcaactccaaatcaacagacgtatgcaaattcagaagtagacaagctctccatggaaacccctgccaaaacagaagagataaaactggaaaaggctgagacagagtcctgcccaggccaagaggagcctaaattggaggaacagaatggtagtaaggtagaaggaaacgctgtagcctgtcctgtctcctcagcacagagtcctccccattctgctggggcccctgctgccaaaggagactcagggaatgaacttctgaaacacttgttgaaaaataaaaagtcatcttctcttttgaatcaaaaacctgagggcagtatttgttcagaagatgactgtacaaaggataataaactagttgagaagcagaacccagctgaaggactgcaaactttgggggctcaaatgcaaggtggttttggatgtggcaaccagttgccaaaaacagatggaggaagtgaaaccaagaaacagcgaagcaaacggactcagaggacgggtgagaaagcagcacctcgctcaaagaaaaggaaaaaggacgaagaggagaaacaagctatgtactctagcactgacacgtttacccacttgaaacagcagaataatttaagtaatcctccaacaccccctgcctctcttcctcctacaccacctcctatggcttgtcagaagatggccaatggttttgcaacaactgaagaacttgctggaaaagccggagtgttagtgagccatgaagttaccaaaactctaggacctaaaccatttcagctgcccttcagaccccaggacgacttgttggcccgagctcttgctcagggccccaagacagttgatgtgccagcctccctcccaacaccacctcataacaatcaggaagaattaaggatacaggatcactgtggtgatcgagatactcctgacagttttgttccctcatcctctcctgagagtgtggttggggtagaagtgagcaggtatccagatctgtcattggtcaaggaggagcctccagaaccggtgccgtcccccatcattccaattcttcctagcactgctgggaaaagttcagaatcaagaaggaatgacatcaaaactgagccaggcactttatattttgcgtcaccttttggtccttccccaaatggtcccagatcaggtcttatatctgtagcaattactctgcatcctacagctgctgagaacattagcagtgttgtggctgcattttccgaccttcttcacgtccgaatccctaacagctatgaggttagcagtgctccagatgtcccatccatgggtttggtcagtagccacagaatcaacccgggtttggagtatcgacagcatttacttctccgtgggcctccgccaggatctgcaaaccctcccagattagtgagctcttaccggctgaagcagcctaatgtaccatttcctccaacaagcaatggtctttctggatataaggattctagtcatggtattgcagaaagcgcagcactcagaccacagtggtgttgtcattgtaaagtggttattcttggaagtggtgtgcggaaatctttcaaagatctgacccttttgaacaaggattcccgagaaagcaccaagagggtagagaaggacattgtcttctgtagtaataactgctttattctttattcatcaactgcacaagcgaaaaactcagaaaacaaggaatccattccttcattgccacaatcacctatgagagaaacgccttccaaagcatttcatcagtacagcaacaacatctccactttggatgtgcactgtctcccccagctcccagagaaagcttctccccctgcctcaccacccatcgccttccctcctgcttttgaagcagcccaagtcgaggccaagccagatgagctgaaggtgacagtcaagctgaagcctcggctaagagctgtccatggtgggtttgaagattgcaggccgctcaataaaaaatggagaggaatgaaatggaagaagtggagcattcatattgtaatccctaaggggacatttaaaccaccttgtgaggatgaaatagatgaatttctaaagaaattgggcacttcccttaaacctgatcctgtgcccaaagactatcggaaatgttgcttttgtcatgaagaaggtgatggattgacagatggaccagcaaggctactcaaccttgacttggatctgtgggtccacttgaactgcgctctgtggtccacggaggtctatgagactcaggctggtgccttaataaatgtggagctagctctgaggagaggcctacaaatgaaatgtgtcttctgtcacaagacgggtgccactagtggatgccacagatttcgatgcaccaacatttatcacttcacttgcgccattaaagcacaatgcatgttttttaaggacaaaactatgctttgccccatgcacaaaccaaagggaattcatgagcaagaattaagttactttgcagtcttcaggagggtctatgttcagcgtgatgaggtgcgacagattgctagcatcgtgcaacgaggagaacgggaccatacctttcgcgtgggtagcctcatcttccacacaattggtcagctgcttccacagcagatgcaagcattccattctcctaaagcactcttccctgtgggctatgaagccagccggctgtactggagcactcgctatgccaataggcgctgccgctacctgtgctccattgaggagaaggatgggcgcccagtgtttgtcatcaggattgtggaacaaggccatgaagacctggttctaagtgacatctcacctaaaggtgtctgggataagattttggagcctgtggcatgtgtgagaaaaaagtctgaaatgctccagcttttcccagcgtatttaaaaggagaggatctgtttggcctgaccgtctctgcagtggcacgcatagcggaatcacttcctggggttgaggcatgtgaaaattataccttccgatacggccgaaatcctctcatggaacttcctcttgccgttaaccccacaggttgtgcccgttctgaacctaaaatgagtgcccatgtcaagaggtttgtgttaaggcctcacaccttaaacagcaccagcacctcaaagtcatttcagagcacagtcactggagaactgaacgcaccttatagtaaacagtttgttcactccaagtcatcgcagtaccggaagatgaaaactgaatggaaatccaatgtgtatctggcacggtctcggattcaggggctgggcctgtatgctgctcgagacattgagaaacacaccatggtcattgagtacatcgggactatcattcgaaacgaagtagccaacaggaaagagaagctttatgagtctcagaaccgtggtgtgtacatgttccgcatggataacgaccatgtgattgacgcgacgctcacaggagggcccgcaaggtatatcaaccattcgtgtgcacctaattgtgtggctgaagtggtgacttttgagagaggacacaaaattatcatcagctccagtcggagaatccagaaaggagaagagctctgctatgactataagtttgactttgaagatgaccagcacaagattccgtgtcactgtggagctgtgaactgccggaagtggatgaactgaaatgcattccttgctagctcagcgggcggcttgtccctaggaagaggcgattcaacacaccattggaattttgcagacagaaagagatttttgttttctgttttatgactttttgaaaaagcttctgggagttctgatttcctcagtcctttaggttaaagcagcgccaggaggaagctgacagaagcagcgttcctgaagtggccgaggttaaacggaatcacagaatggtccagcacttttgcttttttttcttttccttttcttttttttttgtttgttttttgttttgtttttcccttgtgggtgggtttcattgttttggttttctagtctcactaaggagaaacttttactggggcaaagagccgatggctgccctgccccgggcaggggccttcctatgaatgtaagactgaaatcaccagcgagggggacagagagtgctggccacggccttattaaaaaggggcaggccctctaacttcaaaatgtttttaaataaagtagacaccactgaacaaggaatgtactgaaatgacttccttagggatagagctaagggataataacttgcactaaatacatttaaatacttgattccatgagtcagtttattgtagtttttgatttctgtaaaataagagaaacttttgtatttattattgaataagtgaatgaagctatttttaaataaagttagaagaaagccaagctgctgctgttacctgcagaactaacaaaccctgttactttgtacagatatgtaaatattttgagaaaaaatacagtataaaaatagttattgaccaaatgctaccaggctctgcagcagctcgggggcttataaaatgttcatagggatgttacaatataattttgtgttataaaatatgccattataattatgtaataaccaaaatttcaacctagagtgttgggggttttttggaaaccgcagtctattagtactcaatggttttatacaccttacttctgacagagcggggcgtatgctacgactacaacttttatagctgttttggtaatttaaactaattttttcatattatattgttgcatccctacttcttcagtcaggtttttttgtgcttacaatttgtgataactgtgaataactgcttaaaaatacacccaaatggaggctgaattttttcttcagcaaaagtagttttgattagaactttgtttcagccacagagaatcatgtaaacgtaataggatcatgtagcagaaacttaaatctaaccctttagccttctatttaacacaaaaatttgaaaaagttaaaaaaaaaaaggagatgtgattatgcttacagctgcaggactctggcaatagggtttttggaagatgtaattttaaaatgtgtttgtatgaactgtttgtttacatttctttaataaaaaaaacactgttttgtgtttgcttgtagaaacttaatcagcattttgaaccaggttagctttttattttgtacttaaaattctggtactgacacttcacaggctaagtataaaatgaagttttgtgtgcacaattcaagtggactgtaaactgttggtatattcagtgatgcagttctgaacttgtatatggcatgatgtatttttatcttacagaataaatcaattgtatatatttttctcttgataaatagctgtatgaaatttgtttcctgaatatttttcttctcttgtacaatatcctgacatcctaccagtatttgtcctaccgggtttttgttgttttctgttctgtataatagtatctaatgttggcaaaaattgaattttttgaagtatacagagtgttatgggttttggaatttgtggacacagatttagaagatcaccatttacaaataaaatattttacatctataaaaaaaaaaaa

SEQ ID NO: 1779 - DNA, 6249 bp, HOMO SAPIENS
gtaaacagcgcagggcatttcgggagcgggattgtttcgcgcaggaagcaggctccattttagcgccgcccgccgtcgccatctgtttcccttccctcccccatacctagcccgagtctgagccctaacgagaaggctgggcctaggccgctggatgctggagtgaaaggaagggagaaagggaaaaagcgggaagagtcgagaaggctgagtgttaagaggccaagtgcgacgcgcgtatccgggcagacggactgacggacgggcccgtgcttctgccgcggctgcggcgcccgcgcgagtcgcgtctaagcggcggcggcggtggcagcggcggaaaccgaaggggagccatggcggctgacagtcgggaggagaaagatggagaacttaatgttctggatgatattttaactgaagtaccagaacaagatgatgaactgtataatccagagagtgaacaagataaaaatgagaaaaagggatcaaaaagaaaaagtgatcgaatggaatctactgataccaaacgacaaaagccttctgtccattcaagacaactggtttctaagccactgagctcatctgttagcaataacaaaagaatagttagtacaaaaggaaagtcagccacagagtataaaaatgaggaatatcaaagatctgaaagaaacaagcgtctagatgctgatcggaaaattcgtctatcaagtagtgcctccagagaaccttataagaatcaacctgaaaaaacctgtgtccggaaaagggatcctgaaaggagggccaaatctcctacgccagatggttctgagagaattgggcttgaagtggatagacgtgcaagcagatccagccagtcttctaaggaagaagtgaactctgaagaatatggctctgaccatgagactggcagcagtggttcttctgatgagcaagggaacaacactgagaatgaggaggaaggagtggaagaagatgtggaggaagatgaagaagtagaagaagatgcagaagaagatgaagaggtggatgaagatggagaggaggaggaggaagaggaggaggaggaagaggaggaggaggaggaggaagaagaagaatatgaacaggatgagagagaccagaaagaggagggaaatgattatgacactcgaagtgaggccagtgactctggttctgaatctgtttccttcacagatgggtctgtcagatctggttcaggcacagatggatcagatgagaaaaagaaggaaaggaagagagctagaggcatatctccaattgtttttgatagaagtggaagctctgcatcagagtcatatgcaggttcagaaaagaagcatgagaaattatcatcttccgttcgtgctgtccgaaaagatcaaaccagtaaactcaaatatgtgcttcaagatgcaagatttttcctcataaagagtaacaaccatgagaatgtgtctcttgccaaagcgaagggtgtatggtccacgctccctgtaaatgagaagaaattaaatcttgcatttagatctgcaaggagtgttatcttaatattttctgtcagagagagtggaaaatttcaagggtttgcaagactttcttcagaatcacatcacggaggatctcctatacactgggtgcttccagcaggaatgagtgctaaaatgctgggaggtgtctttaaaattgactggatttgcaggcgtgaattacccttcactaagtcggctcatctcaccaatccttggaatgaacataaaccagtaaagatcggacgtgatggacaggaaattgaacttgaatgtggaacccagctttgtcttctgtttccccccgatgaaagtattgacttgtatcaggtcattcataaaatgcgtcacaagagaagaatgcattctcagccccgatcacgaggacgtccatcccgtcgagaaccagtccgggatgtgggaaggcgtcgaccagaagattatgatattcataacagcagaaagaaaccaaggattgactatccccctgagtttcaccagagaccagggtatttaaaggatccacgataccaggaagtggacagacgattttcaggagttcgccgagatgtgtttttaaatgggtcctacaatgattatgtgagggaatttcataacatgggaccaccaccaccttggcaaggaatgcccccttacccaggaatggaacaacctccacaccatccttactatcagcaccatgctccacctcctcaagctcatcccccttactcaggacatcatccagtaccacatgaagcaagatacagagataaacgagtacatgattatgatatgagggtggatgatttccttcgtcgcacacaagctgttgtcagtggccggagaagtagaccccgtgaaagagaccgggaacgagagcgagaccgccctagagataacagacgagacagagagcgagatagaggacgtgatagagaaagagaaagagagcgattatgtgatcgagacagagaccgaggggagagaggtcgatatagaagataatgggcttttggaagcactgattgtttaaagatacaaaaaatcttgtattttttttttgtgtgtgtttacaagtagtaaatttattttcagctgtctgcctatgaagttcattgtgtagaaggatttattatgaccccctttgttccaagcatgcagtatcataagaactggaaaaactcaaatccgccaaaaatccacagctgacagttgaattgacacttttattggggcagaatggaacagtccaagaatgtagatactgattctttctccataaatgttcttatagtgtgttcatcctagagttatttttttgtttgtttttttcctttttggatcttgattgataactgccatgatattttgctttgatgtgtttctacatgtagttgcacacggttcagtaaaaataatgctgctatcgagtatgcaaatattgaagtatgatggtttgactgtatggcagtgttgtagcagcctcttgtttttttccccattgcctctttttttaaaaaacttataaagtcactttttatttttcctcagtcttcaatgacgagagcaatattaagaagacattgctatctaatttttaatctttttaaatgaaaaattcctatgttcagtagcgtggttgatgctattgtttagccttcccctccaaattgtatacattggcttggaatgttcacaacttgcgtgcgtggcagcggaagacgattcccatattctacattgctactgttttgtataaaataaattggtaaagattgacggttatcttttgtatctttttcttatccaattgcaggtttgttttattatgcaataatggacataaaagcatgctttttgttcaggaattttaggaaccccatttgctttttttgaggcacactttagcagaaatgattgacctaggcctgttgcattaaaagcttacttctatttctaacataagatacacagagttatgttaataatttggttaagtatttatacacctgataacattttgagtctactctgatcacagaatcgtttatttaggttttctatttgttgttttagtcttctgtaagtgaacgactttgtacatgctttctactttacttcataaatggacttttaaccctcttgtattagttctgtattttaagttaactgtccagttctcccagtggtaaccaactataacatagaaatagagccgctcaagaaaacagtttatgaaataatttttttgaattttttcttgagttacacctggagttttggcctttggaatttggcctttataaacattaggaatatttgaatgtttgatttttttatagtatcaacagttgtactgtgtaccagatcacatagtacagttttacatttaatctatattggcctgaaaagaacaacacaggcactttactcttaaaggatataataaactatagttatactgcattcatattcataccagcatgtagtatctttccctgcattcacagaagttttatttacaatgacaaaactaaagcctgaggatttgttttaaatctgcattgtggtagagaggaaaaagtacttttaaggaaacctgggttctagttttgtcattgtctttaattaaaccggttagtgatacatggtaagtcacttcattggcattttgtgtattcatcagtaagctagacaagatgatagctacagtttaagaatttctgtaaccattatacaaaactggtaggtaatattaaaggtattttcctgaaataataggaataaatactgagcactttgtatgcaatagagactttgtgcttttatatacagactcatttaaatgggctcagagaggctagtaaacttgcccaagattagaaaggtagtaattgatgggccaagattttacccatgtttttatttggtgtttctaaaccacctcatcacttttgaaaaaacagtatataaattaataaatgttttggagatggagtctgtcgcccaggtggagggcagtggcatgatcttggctcactgcaacctcctgcctcagcctcccgaatggctgggactacaggcacccaccaccacaccccgctaatttttgtaattttagtagagatggggttccaacatgttggccaggctggtctcaaactcgacctcaagtgacctcacctgcctcagcctcctaaagtgttgggattacaggcgtgagccactgcacctggcctgagatttttaaacattaacatttccttcaggcttaagcagaggatttttctaaagtgccatccaattagatgttaagttatgctttgtatgttgagcttagtattgagtcgatctattttaaaaagccaacattaagtttttaccaagtatctggcactattctaaacaattctgttggctcacataatcatcactgttttctcctttcctaatttttaaaataaacttaccggaacattgtataaaaaatgcaagatttttttctgtacagaagagtcagtatataaaaatcagtatgttttatttaatattcgtacacatgacagcttttgtcactgtgagaagacatggtttctttcgtgtactccactgtgctgtgattctaacaatctacattagtatgatgtgttcagatgaaaaacagaaaattcagtcattccgagtttagaaatccggtcagggattttattggctggagtaatagttcaaaggagtgaaaattcaagcatgtaatttttggatttgatttcctccataatgatttcctccataatggctttttttcaagcatggtctaatttttcagaaaatggccattatctccaagcttccattgtccatgtagtttcagtggcaggagagagactattttcctcccagtgtccatgtcagttccccaaaaggactgaatagccatgttggttttggagccagccgtaatccaatctgtatttccaaggaaatggggttctttgtctcccagcattgggaagcaagagaggcacatgttatggtcacctctgtgaggattacatcaggaaggacagtctccaaaagacatggacagaggaaatttagcagatgtccattaaatcaggatctcatacaagttataacacctgaatgtttgacttttcagagtattttgccatcacaggtgtggcatcttgcccttggatatatctacattctgctgtagaatgtcgtggtctttctgagggtcacatacatcctgtcttgtcataatgttaaccattaagagtcctcaggggcatggaattgaagaaggaactgttgccagcagttaactgaccaagctagagttccctgacccaacgtaagggtgactgtgacacacatggataattttagcttcatgtttaagattttgttatttgggtaggaaacattccaaatgcagtttgaaacacatattaaaattgaggcacacaggaaagaactggctcaagtttagtccccaagttccttatagtaggaataggaatccttagagtataagcaatccatgcatagtattctgttatctatcatgtagatcatttaatctctaattttttggggtggggattctcttgtttctaaatcttacactttcagtttcttctgtgtcttaaatatagattattgactattgtcttaaatactaataaatacattaaatgtatcttaaatacta

SEQ ID NO: 1780 - DNA, 483 bp, HOMO SAPIENS
  misc_feature (45)..(89): n is a, c, g, or t
  misc_feature (95)..(95): n is a, c, g, or t
  misc_feature (109)..(109): n is a, c, g, or t
  misc_feature (114)..(115): n is a, c, g, or t
  misc_feature (117)..(117): n is a, c, g, or t
  misc_feature (119)..(119): n is a, c, g, or t
  misc_feature (128)..(128): n is a, c, g, or t
  misc_feature (132)..(133): n is a, c, g, or t
  misc_feature (135)..(135): n is a, c, g, or t
  misc_feature (154)..(156): n is a, c, g, or t
gaagagtacagtccagtttctgttgtagaacgtccttgaagttgnnnnnnnnnnnnnnnnnnnnnnnnnnnnnnnnnnnnnnnnnnnnntgggangacaggctgtaggncgcanncncngatcctgcntggnncnaggttcaacagaagtaggnnngtttcatcatgacctggcaggaaaaccaccagacctggaattttgcttttacaactgtttaacttctgtttcatacaggatggaaaccggtgaattgtaatctcacataaccgagcaagatctagtagtcataagcactttgtcagagcaaagcagacaaggcaaagtgttggaaatgtcatcggatcttcacagaaccttagccaagcagcctttcaatgcgagaaacaaaataacatggatttttatctagtaatgaagtcaacaccattgtccaccctgggttaacacattcacatctcaaagcgaatggggctgcagacactc

SEQ ID NO: 1781 - DNA, 4084 bp, HOMO SAPIENS
gaggtgcgaccgggtcccggcctgagtcgcggccacccgcaggtctgagctgtgggctgaggcagcgcagccgctgccgcagggtgcgcgatgccttgaacctgggaaactatgtgaagcaacactctggattttgaaagacatcttttcatcatgggacagcaaatttcggatcagacacagttggttattaacaagttaccagaaaaagtagcaaaacatgttacgttggttcgagagagtggctccttaacttatgaagaatttcttgggagagtagctgagcttaatgatgtaacggctaaagtggcttctggccaggaaaaacatcttctctttgaggtacaacctgggtctgattcctctgctttttggaaagtggttgtacgggtggtctgtaccaagattaacaaaagcagtggcattgtggaggcatcacggatcatgaatttataccagtttattcaactttataaagatatcacaagtcaagcagcaggagtattggcacagagctccacctctgaagaacctgatgaaaactcatcctctgtaacatcttgtcaggctagtctttggatgggaagggtgaagcagctgaccgatgaggaggagtgttgtatctgtatggatgggcgggctgacctcatcctgccttgtgctcacagcttttgtcagaagtgtattgataaatggagtgatcgacacaggaattgccctatttgtcgcctacagatgactggagcaaatgaatcttgggtggtatcagatgcacccactgaagatgatatggctaactatattcttaacatggctgatgaggcaggccagccccacaggccatgaccttgaagtgaaagtcttctgttgctattgtgggctcaaatatttggtcatgggggaagaatgtagggttgtggcactggcacagacacaggaaaatccattttccccactcttttatttttgctattctgatcatttgtcccccttttaaaaataaacttcccatgtcttccatttgtggtactaaaatttgctactgttttagaccatattttcctattatttatctgttcaaatttgtattattacaactaatagctcttgaattctttgctaaaggtaacagcaacacttccagaggcttctaaaacactactgttttgcagggcaggagtattctggaatctttttacttagatataaaataaacctcgaatattaaaaagttgtagccatctgagagaggaaagtttaagtgactgaaaatgtagaatacttcaacgtgcatgttactacttaaaactagtctttctgctggaatctaaggagtatatatatatatgcccccttgtggttaattattgctcctttaataatttttacttgaaatgatccacaattatttcataactttagcagtgtgttttggaactactgtacttaaaggtttgtttgtttgtttttgccatactgtataatttgggtgaggtctacaaaattgggtgtgactttcctttgcaaatggatttctcctggggaattttcttggctgttctggaaatgctttcccacagctgggtaactgttctaaatggctttgataatgctcacacatcttggagtttcagaaggaaattattctgcatcacaaatactaaattttatatttctaaattactataggtcatttaatattggtttatggtgcttttatttccttaacttgaaaacatctttctgagatttcagagtcctcaaatttcttagattaagagacaagaggccagtgcagtggttcacacctgtaatcccagcactttgggaggccgaggtgggtggatcatttgaggttaggagtttgagaccagcctggccaacatggcgaaatcctctctctactaaaatacaaaaattagctgggcatggtggcaggtgcctgtaatctcagctactcgggaggctgaggcagaattgcttgaacccaggaggtggaggttgcagtgagccgagatcacaccactgcactccagcctgggagacagaacgagactcctaatcaaaaaaaaaacacaagaaaatagagtgaggcttttttaccgtatatacataaaatacttatgaaaattagaagataatttggcattcctactgtttcactgtacttccattgaaatactctttccattaaaatattctgaaacaatatagtaataatggaattgtgatcttcagttgcacctcaaccattttttttgcttatgaactaaaatttctaacattaacatttcggcatgtaataaaacaagggcctatctcctttaaaatttaacattccatgtaacttttctgacttatcattcataagttgcaaatattactattttcctaaaccagggtacacaatttaagttgccacttattgatgacagaatttctggatagtaggattttaataggcgagcaaataaaattcaaatcaatttcaaggaaaaacatctggccaggggtagcttgatttcgcccccaaaaatactgaagactaatccattgacattcataatgggacagctaagtaccaaatagctaactactccctatggaggtttatgcaagcagagtaccaggggttccatcatatcaacctggcaatgcacttggtggttgtgtgaccttgagaaagtctcttactcttgtttatgtgttcttactttagaaactgagactttatttgtggttttcacactatttcagcagcaaaaactttttcaaggaaaatcttacagaacctttaaacacgtgtgcatacacacataccctataccccactatataaaagtcatattattataaatttccttattatataaactttatatactataaatgtgattaagtcaatgaataaaaacattaatgcattggtgatatccagcatgtttgaatttggtgagtaacacacatatagtgggagtcgttttttttaaaaaaattttttaattaaattcaagtcaaatttgcagaaccctgtatctcctccatagattcttagtattccatggaacatattttgaaaaccttgggatagatgatccactgaaatcttttccagctctaagattttaaattgtccttttagattagacttgctgagtttaattcagattacctaattttaaaatgtttctgaaaagtgaacagagttaccttacagagttttggatctttccagggatagccaatgattttatcccccagaatccttcacctttcaaggagttatttaacaatgagcccagtgactcaatagggcccaaacctttttattttacaatatgagctccaagacacttactgatctactgtgaatataaaatgttattagccttatcaaataaataaatgagcacagctctttgttcgctctattgaactgggtgataattatttagatgtgaatgttaggtcagttctactgtaataactaatcgtaaaagttgtaaatttgtttaatggatgaaatgtacactttttgtattctgtacagctttgtcttttttaaatatgaagtacttaaatgtacttactatgataggaaatataatgtgtgccttctaggatttgtgaagtggtttcatgaactctaaggaatttgttttccctatcctaactcagtaacagagggtttactccgattatgtatagaaccttagtttgagaaaatgaattttactatgtactgaatttagaggttgagaataataggatctgtgttattcttagtacccactgataaattgtgcaataaataatctttcgcaagtgattttagctaattgaagagattattttcctatgtaatttcacattctaatatactaaatgtttatattccttagagaactattttatattgtgcgctgggggcttgtgatgtttgtgtgctgttttaaaattcatttcaaattggactcgatttccttatatctaatatatatctgggagaaaaggctgcttgaaaatatcttttgattcagtgatttttaacattgggaagttgagtttattaaaaggtagtctg

SEQ ID NO: 1782 - DNA, 2596 bp, HOMO SAPIENS
agagtcccgcgggcggcgcggaagcggcggcggcgcggccggggcagccatgtcgccattgtctgcggcgcgggcggccctgcgggtctacgcggtaggcgccgcggtgatcctggcgcagctgctgcggcgctgccgcgggggcttcctggagccagttttccccccacgacctgaccgtgtcgctatagtgacgggagggacagatggcattggctattctacagcgaagcatctggcgagacttggcatgcatgttatcatagctggaaataatgacagcaaagccaaacaagttgtaagcaaaataaaagaagaaaccttgaacgacaaagtggaatttttatactgtgacttggcttccatgacttccatccggcagtttgtgcagaagttcaagatgaagaagattcctctccatgtcctgatcaacaatgctggggtgatgatggtccctcagaggaaaaccagagatggattcgaagaacatttcggcctgaactacctagggcacttcctgctgaccaaccttctcttggatacgctgaaagagtctgggtcccctggccacagtgcgagggtggtcaccgtctcctctgccacccattacgtcgctgagctgaacatggatgaccttcagagcagtgcctgctactcaccccacgcagcctacgcccagagcaagctggcccttgtcctgttcacctaccacctccagcggctgctggcggctgagggaagccacgtgaccgccaacgtggtggaccccggggtggtcaacacggacgtctacaagcacgtgttctgggccacccgtctggcgaagaagcttctcggctggttgcttttcaagacccccgatgaaggagcgtggacttccatctacgcagcagtcaccccagagctggaaggagttggtggccattacctatacaacgagaaagagaccaagtccctccacgtcacctacaaccagaaactgcagcagcagctgtggtctaagagttgtgagatgactggggtccttgatgtgaccctgtgatatcctgtctcaggatagctgctgccccaagaaacacattgcacctgccaatagcttgtgggtctgtgaagactgcggtgtttgagtttctcacacccacctgcccacagggctctgtcctctagttttgagacagctgcctcaacctctgcagaacttcaagaagccaaataaacattttggaggataatcaccccaagtggtcttcaaccataaactttgtgattccaaagtgcccagttgtcacaggtgccataaataattacattttccaacataaatgtgccattttccttgccgcgttaatacaactgagtacaaaagttccaagagagatgctctcttttcaggggctgcaatgtcctctctgagacctagtggtggatgaggtctcctgtttgattttgttcctgcactcactcatttttccagagacccagctgtgattcacaggtgtcagacatggggaggtgtgagccttgcttgctacagcctgtaggatgagtttgacgtggccagcagcaccatctggtcaacctcattccagaatggcacagtcacaagtgaagcatgccactgtcaaatccgagaatgtaaaccgctgaacagctatggatcaaatggtagccctcaaaagatatgttcatgccctaaccctcagaacctataaatattactttatttggaaaagaatctttgcagatagaattaagaattttgagatgggtcattatggatcatcccagtgaacctaatgccatcacgagggttcttatcagagacaggtagagggagatttgagtacagaagacaagatattcgtgtgatgatgcagacagagactggagtgatgccaccacaagccaagcaatgcctggagccaccaggagctgggacaggcaggaaggattctcccttatacccctcagagcaatcttggcccctctgacgtcttgactttagacttctggtccccagaacggagagagaataaatctttcttgttttaaggctccaacaaattggtagtcacttgttacagcaaccacaggaaatgtatacagcttctgatacttctgaaaacctcacacagccaaagggtacatccttggtatagaggctcactcttactcaccagccaggcaaggaaggctcaatcctttggtgttagagagatagatgttgggttttcaaatttcaacatagagaaatcagtcatttgcaatgcttttgagaaagtactgtgtataccctacgagcctgcactccttatgtgtgagactgatgaccattggttggcttattatccattccactaagtgacaaaatcccactgactattcaaatccaggctcctggcatgcctgtaccttagaatcacaaccagctgcaattccaggatggagttcaaactaattgtgggggcatgtgcttcttacatgactgctagattgttcccagatggggaaggttgccctgataagcaacttaaatgaaaataataaatgtattgtttggcctctttaaaaaaaaaaaaaaaaaaaaaaaaaaaaa

SEQ ID NO: 1783 - DNA, 787 bp, HOMO SAPIENS
ggaagctctgagtcactgaatagcaaagaaaaatatgaaagcaagaggaattgctttcacatctagaaaatgttgcaagataatctgaaatcttctggtgctggtgaatgcatgaagaggttcacagtatcttttaaagtacttctgaaaagataaggagtttaaaaggtgggtgtgtacactggcactgagctgcagtaggatttttccttggatagtctggtctggagctgggacagcagctgctgctgtggaaaggccagctggcaagatgatggaagaaatctccattatggtagcctatgacgcccatgttttcagccagctgcacgatgaagacttcctcactagtctggtggccatcagcaagcccaggtctatggtaccaaccaagaagctgaagaaatatgagaaagaatatcagacaatgcgagagagtcagctgcaacaggaagacccaatggatagatacaagtttgtatatttgtaggtaactccagctgttgcatttatactgggaatcttcataagaagctgagagaaagagaggggaaaaagaaagtggctttctactttcaaaaatgaaacaaaaaggaaaaatggcaaagtactgttttagctgtgcatgtcatatccacaaagacttttagcaggtgaactgttccaagactgacacaaggatgtttcaaacttgcctctgtctgtagaaaatgttaaaaataccaactcacttggaaggaaaaataaaaatcacaaaggtatattgagcacagtaaaaaaaaaaaaa

SEQ ID NO: 1784 - DNA, 2880 bp, HOMO SAPIENS
gtaggccatggagccgagcagatccgggtcttcgggtggccgcaatgtcccaagtggacgacacccacctagtcccgaggacaaccgacaaagtccttaatgggcccagaaggaggacggagtcccagagaactacaactcccatcaagcacttgggggatcgccgcggctgagggagagactatggcttaggaaccaccattcgcgtgaggctctgctccccgcgcctgcgcagagtgcagggccacgtcgcttttgctgtaccggggaccacgcgtctcatccatggcttccgcggactcgcgccgggtggcagatggcggcggtgccgggggcaccttccagccctacctagacaccttgcggcaggagctgcagcagacggacccaacgctgttgtcagtagtggtggcggttcttgcggtgctgctgacgctagtcttctggaagttaatccggagcagaaggagcagtcagagagctgttcttcttgttggcctttgtgattccgggaaaacgttgctctttgtcaggttgttaacaggcctttatagagacactcagacgtccattactgacagctgtgctgtatacagagtcaacaataacaggggcaatagtctgaccttgattgaccttcccggccatgagagtttgaggcttcagttcttagagcggtttaagtcttcagccagggctattgtgtttgttgtggatagtgcagcattccagcgagaggtgaaagatgtggctgagtttctgtatcaagtcctcattgacagtatgggtctgaagaatacaccatcattcttaatagcctgcaataagcaagatattgcaatggcaaaatcagcaaagttaattcaacagcagctggagaaagaactcaacaccttacgagttacccgttctgctgcccccagcacactggacagttccagcactgcccctgctcagctggggaagaaaggcaaagagtttgaattctcacagttgcccctcaaagtggagttcctggagtgcagtgccaagggtggaagaggggacgtgggctctgctgacatccaggacttggagaaatggctggctaaaattgcctgagaggcagctctaaagcacaagacctggatgtgtgacacacagttttggaaaaaggtctgtggtagtctggagttgatgaggaaggggtacaagatgtggttagaaacatttctttgttctggaaacaaagtactgttgaaaccagcttggaattttttttttttttttttttaagttcagttctcccttatggctgcctttcaaacaagtaccttttatctgatgcctgtatcttccctttgttaaggtgtaacttgatgtagggtcaaggtttttgtgacaacaggcagactccacacagagaggatatgatgagaatatggccatcacctgaaaagttttcttatcttctgtgcttttggtccctggaaacaaatccgcctatgtatgaagctagttgatttccagttgcactatttccagttgcctctgaagttcacaggcaatacattgtctagtcctttgcgaatttctctgatttgtgggcacagttatgaagtttccccacatgtgaagacaggtacaaaatagcagagccaagcagacagtgggtctattcttcattagctcagtgacttgtccacactcgtcttagcacttacgtttcaaaagcttgtcacaaacccttggagtcattcccagataatagaactggaaatgataaatcccctaatgccaagggtctagtgtgttcttagtggttatactgggaagtgtgtggagatttaggtgctgctctgctgctctggatggctgaaggctcctgggccatcttcatgtgctgcttgaagagctcctattttgtactcctggctagaatgctgtggaacaaatacaaagtgaaaaaagttctctgtagatttctgaagtgcatattcattgatgccaagaaaaaaaaaaagttgcctttttgaagtgatgttttttgctgtcttcttaaacacaaggcttttttgaatgattagtatatttcatggtaaagaaaacagcctgtctggctcaaagcaattaaatagaatgtaatggtgagtacaaatgagtgcacatgtcaggactcaggtctaactccttgtctcctgagcctaaagattgcaacatacacaagaacacactcctattcctaccccacacactcagggacaagcccaactaaagcttacaaggagaccagggtggctctgtccaggggagaagccagttatggaacagtgcattgagagccatggtaggagaggcccacagttctctggagcatgcagcaggggcaccccacctggccttgaggatcagggggagtcaaaggataaagcatggggctgatgacgtctgagggagtgtgatcctccatgtatggcctctgcctgctgtctcacatgtcccttctggtggtcacttgggctctaggagtatacgtcacctcagaccatctggcagaaatactccaggctcctaccccaaagcacatgtcagccttgctgctggagcacgaagacaatgtaaatgaaacatgaaatggaggagttgtgagaccctgaccctgagtccttacttgaaagctgctgctggtgttctgagtgtcttttggactcttatttcttgcccttttccttattaggcaagcagtaacttaggaagtaggtaagagcaataaatgtgacatgttatgtcatcatagtaggagctcatgggaataaaagtcagtggcttgatgcttctgttagaggcaaaaaaaaaaaaaaaaaaaaaaaaaaaaaaaaaaaaaaaaaaaaaaaaaaaaaa

SEQ ID NO: 1785 - DNA, 9243 bp, HOMO SAPIENS
atttcatttcttccactaaagcgtttgcggagacttcaaggtataatctatcccagatcctttcccagagagaaacttggcgatcacgttttcacatgatgctcacgctcagggcgcttcaattatccctccccacaaagataggtggcgcgtgtttcagggtctctcgtctctctcctacagaaaagaaaaagaaaaaaatgtcattagaagaggcgtaacacgtcagtccgtccccaggtttgtgtttcctggagtggccgaaagagatcagttctaacctgctctgcaggaataacggtcctgcctcccgacactcttggcgaggtttttgtacagtttgctccgggagctgtttcttcgcttccacctttttctcccccacacttcgcggcttcttcatgctttttcttctcaccatttctggccaaaactacaaacaagacttcgcagatcgagcctgcgtgctgccgaagcagggcgccgagtccatgcgaactgccatctgatccgctcttatcaatgaagcagccgatcatggcggatggcccccggtgcaagaggcgcaaacaagccaatcccaggaggaaaaacgtggtgaactatgacaatgtagtggacacaggttctgaaacagatgaggaagacaagcttcatattgctgaggatgacggtattgccaaccctctggaccaggagacgagtccagctagtgtgcccaaccatgagtcctccccacacgtgagccaagctctgttgccaagagaggaagaggaagatgaaataagggagggtggagtggaacacccctggcacaacaacgagattctacaagcctctgtagatggtccagaagaaatgaaggaagactatgacactatggggccagaagccacgatccagaccgcaattaacaatggtacagtgaagaatgcaaattgcacatcagattttgaggaatactttgccaaaagaaaactggaggaacgcgatggtcatgcagtcagcatcgaggagtaccttcagcgcagtgacacagccattatttacccagaagcccctgaggagctgtctcgccttggcacgccagaggccaatgggcaagaagaaaatgacctgccacctggaactccagatgcttttgcccaactgctgacctgcccctactgcgaccggggctacaagcgcttgacatcactgaaggagcacatcaagtaccgccacgagaagaatgaagagaacttttcctgccctctctgtagctacacgtttgcctaccgcacccagctcgagcggcatatggtgacacacaagccagggacagatcagcaccaaatgctaacccaaggagcaggtaatcgcaagttcaaatgcacagagtgtggcaaggccttcaaatataaacaccatctgaaagaacacctgcgaattcacagtggtgaaaaaccttacgagtgcccaaactgcaagaaacgtttctcccattctggttcctacagttcgcacatcagcagcaagaaatgtattggtttaatctctgtaaatggccgaatgagaaacaatatcaagacgggttcttcccctaattctgtttcttcttctcctactaattcagccattacccagttaagaaacaagttggagaatggaaaaccacttagtatgtctgaacagacaggcttacttaaaattaaaacagaaccactagacttcaatgactataaagttcttatggctacacacgggtttagtggcactagtccctttatgaatggtgggcttggagccaccagccctttaggagttcatccatctgctcagagtccaatgcagcacttaggtgtagggatggaagcccctttacttgggtttcccaccatgaatagtaatttaagtgaggtacaaaaggttctacagattgtggacaatactgtttccaggcaaaaaatggactgcaaggctgaagaaatttcaaagttgaaaggttatcacatgaaggatccatgctctcaacctgaggaacaaggagttacttctcctaatattccgcctgtcggtcttccggtagtgagtcataatggtgccactaaaagtattattgactatacgttggaaaaagtcaatgaagccaaagcttgcctccagagcttgactactgactcaaggagacagatcagtaatataaagaaagagaagctacgtactttaatagatttggtcactgatgacaaaatgattgagaaccacaacatatccactccattttcatgccagttctgtaaagaaagttttcctggccccatccctttgcatcagcatgaacgttacctttgtaagatgaatgaagagatcaaggcggtcctgcagcctcatgaaaacatagtccccaacaaagccggagtttttgttgataataaagccctcctcttgtcatctgtactttctgagaaaggaatgacaagccccatcaacccatacaaggaccacatgtctgtactcaaagcatactatgctatgaacatggagcccaactccgatgaactgctgaaaatttccattgctgtgggccttcctcaggaatttgtgaaggaatggtttgaacaacgaaaagtctaccagtactcaaattccaggtccccatccctggaaagaagctccaagccgttagctcccaacagtaaccctcccacaaaagactctttattacccaggtctcctgtaaaacctatggactccataacatcaccatctatagcagaactccacaacagtgttacgaattgtgatcctcctctcaggctaacaaaaccttcccattttaccaatattaaaccagttgaaaaattggaccactccaggagtaatactccttctcccttaaatctttcctccacatcttctaaaaactcccacagtagttcatacactccaaacagcttctcttctgaggagctccaggctgagcctttagacttgtcattaccaaaacaaatgaaagaacccaaaagtattatagccacaaagaacaaaacaaaagctagtagcatcagtttagatcataacagtgtttcttcctcatctgaaaactcagatgagcctctgaacttgacttttatcaagaaggaattttcaaattcaaataatctggacaacaaaagcactaacccagtgttcagcatgaacccatttagtgccaaacctttatacacagctcttccacctcaaagcgcatttccccctgctactttcatgccaccagtccagaccagtattcctgggctacgaccatacccaggactggatcagatgagcttcctaccacatatggcctacacctacccaactggagcagctacttttgctgatatgcagcaaaggagaaagtaccagcggaaacaaggatttcagggagaattgcttgatggagcacaagactacatgtcaggcctagatgatatgacagactccgactcctgtctgtctcgcaaaaagatcaagaagacagagagtggcatgtatgcatgtgacttatgtgacaagacattccagaaaagcagttcccttctgcgacataaatacgaacacacaggaaaaagaccacatcagtgtcagatttgtaagaaagcgtttaaacacaagcaccaccttatcgagcactcaaggcttcactcgggcgagaagccctatcagtgtgataaatgtggcaagcgcttctcacactcgggctcgtactcgcagcacatgaatcacaggtattcctactgcaagcgggaggcggaggagcgggaagcggcggagcgcgaggcgcgcgagaaagggcacttggaacccaccgagctgctgatgaaccgggcttacttgcagagcattacccctcaggggtactctgactcggaggagagggagagtatgccgagggatggcgagagcgagaaggagcacgagaaagaaggcgaggatggctacgggaagctgggcagacaggatggcgacgaggagttcgaggaggaagaggaagaaagtgaaaataaaagtatggatacggatcccgaaacgatacgagatgaagaagagactggagatcactccatggacgatagttcggaggatgggaaaatggaaaccaaatcagaccacgaggaagacaatatggaagatggcatgtaataaactactgcattttaagcttcctatttttttttccagtagtattgttacctgcttgaaaacactgctgtgttaagctgttcatgcacgtgcctgacgcttccaggaagctgtagagagggacagaaggggcggttcagccaagacagatgtagacggagttggagctgggtattgttaaaaactgcattatgcaaaaattttgtacagtgttaaggcctaaaaactgtgtggttcagagactaattcctgtgtttaatagcatttatactttaagcacaactagaaaattgtaagaattgcactctacttatgtatcactacaaactttaaaaaactatgtctaatttatattaatacattttaaaaaggtgcccgcactaccatacatcagtatttttattattattattgttattcctttttaatttaatgtgctcgcactacaatgcatcagtattatgattcctctgtactttcctttcgctattcatcaatttcccattttttttttcagcttaagtaaccacacaattttaggcctcaatttttttttttttctgtgaaggaacttgaagtgatgcatgtgtgaatttaagataccgaagtcttaaagtgacctggacgtgaaggaaaaagtaagatgagaaataaagaaagcctttgtaaggtggttttaaaagccttatatgcaaaccttttaatctgtgtttctgcaagtgccatccttgtacagtgttaagagggtaacatgggttacctttgcaccagcttcagtgttaagctcaccctgttctttgaagcacccatgtcagtattagaagaataggcagcagttccttagtttacatatgtttgtgcaattattttctgtacttttttgttcattaattttgtcagtattacaccaaactgtttttgcaacaaaaaaattttttttgcattcatttaattttaggtcaaataacattttatttatgtggctcattttatatttcctaattttatttatttcatactgtagtgtacagtattatagttcttcaatatatagatatattttagtaaaaaaggaacatgacgttgatcatttgggcaaattttacgtaaagagaagagcatttattgtgttttggaacattaattgtgagatgggatttttcaattttattattttatttttgtttttttccaattactggaaattccaaatttgggaacttttgatacgatcttgtgaaaacactgtattttcgactgaaaattccactttcttcatcttgttttttagctaaaaagagggactgttaaatacaatgtatgataccatgacaaaaatctttcctgaattgtctttgtaaaagtattattgaattttcaatttgtaatttcttttgaaaatgaccatgctcgaataaaaatgtagccaaactaagaatgtagttaatgagttctgtacttttagagagttttccttcaatgaccattaacatgtaacatgctttatgcttataataatgctaattatgtttttttcatataattttagtttagcaataattttgactggtaccaataactgttttttaaaattccatacctatgtacagcaattttacagcttttctcaactgatcctgattccagattgtgtatttttatgtgaggttatattattcaaatttagtctatttactttacagacatttctacttttgcattacgagtatttagagattatgtgttaaaaattcacttctctgtccaaggggtctttgtgatttattcaaaaaaaagtctaatttcaaaaagacagctattattcagtgttatttataatatgtaaccttttttaaaggattgggatagtttatctcactttttgaaatgcagacagtagtttaccgtttatctgaaactagaaggcgtgggtgggagaggaaaagctaaaagcaaatgctaacaaaaataaccgtgattttctaagacagtttttcagtttttacaagatgaccctaatattcagaatatgaatgtattcgtaggttttacataatgacttttatcaagaaactagattctgcttcttaaatctaattgccaagtgaagaataacagaaaaaacagattaccttatcaaatttacagctcttgaatatacagaactataatatagtagctgtccatgtattttttctactttagaatcaaagaagaaaagcatcattttgctattaaatttgctaaaattttgagtatgatatttccagttggcaagaacaacatatttatatttattccttagccataataccactttcctaaatttcacaaaagtcattctttgcaacttgaaactcaatagaaagtgtgtatgtgtgtgtgtgtatatatatatatatatacacacacacacatacacagaaaggatgtaatgaagatacagtaatagttgagcagacctttttagaaaaacatgtttttagctctatcttcaaactttctggcagagggggtggggggggcagggggaggagtggcatcaaaatgctatgcctcctgttatccacagcctagagtttttatatttggaaagtttagaaaattctatcctcgtttctccttctttgaatggcacaaataaatacactacataaatttttctggtttgaaaggctctaggcgataactttattaattcaacctgaaaatatcaagccattaaattttgtccgggtagaataaatccctgtggcctcttttaaagcaatgtaggtctctgttgcccatggggcatatctgtgtcccaatccacaagagataggaccaacaaacaatgaatgtgcaacctaactctttctccttggaaagaagaaagtgtgcacgaagtagaggagggtgggcagaccctgccttgcccctcctgttacccccttctctgtcatttgttcctaactccatttcataggcaggctcagaatacctgagtctgaaaatatcaggataacacttgtgaattgtgacaatcactacaatgtcccatatctgaggagttttttttaatgctatttatccgctggacacgattgcacattagggctgcataatcctctaactctagggaaaaataaaaacttttgatttgtcttaagattcttctccaaggtcgcaaacaagaaattcccctccacaaccaagagatgtgcattttagtaacatcagatgtgttcttctgttttatcaactacttactcttcccacacgcttagttctaaatctaacctttcccccctcgaatagggggcaggggaggatgaggaaacactggaacaactgaacacccctgcccattttctccaagagccttttgtattctagcatatctgtgcaatcttttcttttttcttcacatgacactgtaagcttaggcctgaaataactgggaagagagatgcgtatcagaatttctccgcaagagctaaacaaaacatacatcttccttagcatgaattggactgggggcggagtgggagggcttggaggaaaggggaaagaagggactatatttgaataaatatgaataaatgtattagatacttttcacaatcagataacttttaaaaaggtcattttttatctttctaataatgtaagccttaataaaagcaaatcttagtcacaaatttgaggagactgcccaataataagtttacatgtatttgaactgaaaaattgttaaccatgcttttgctccaagatgtgtgaggccattcaggggctgtagggccctggatatacacacaaacaagtgtgtgtatatctggagccccacacattgtaataaacacagctgcatttatttgactatgtgatcccatgtacatgtaaaaacattcaaacaaacacactcagcggatttatttattgtgcaatggggcaattattcaaataaacatgctcaatgcaattatttgaatctcacattgcatgttcatcaatcatagcactaaaaaaagagggggaaaaaacaccaaagaattcacatggggaaaaaatatatatatgaaaaccaccttattatagattttatagggcagctgaggttatggctcccttcttaactgtaactcaactattctgtattcaatgacatttgtttctaatgattaattggttcactcacttgatcatataatagcaaactttataaacctgtattgtgtagagatgtgaaatctctatatttcaagagcagaagagttctttctagacaccttacatcaagggacactggtccaattattatcgcttatataagcactcctataaattctgaaaaattttatacatgcaacaaaacattcctacatttgaagacattaagaaaaatcacaggtgactcatctgatcattctatatattaataaatattatgacatatatgtgaacacatcacaaatcatattggtgtaccaagaggcaatttatgcctctcttaagtatgtactgacataacctaatatactaaaatgggaaggggcttttagtcactgaaatatgcatcgtgtaacaaagatgaagaaaatacatggcttgtgcccatcataaaaaaagattcagactgaaggcttagctttggttttttcaattaaattgttaaactgtgcacagtgatttttttttagaacttgagacatttgtgatgttggctgtttaaatctttgttaccttcgctgtgaattgaaattgtacatatttagtaaatcatgcagacaaaacaaactttttagacaatatttttattggagagttttcttttcctgtatccatgttaaaaaaaaaaaagacctcctttcccaaaataaaaatgtcaatactaaatttaaagaagtataaaggaatgattgcttcctttagagcaaaatatttaaataaacatggagataattggcaacatgttctttttgggctagtaggctgtgtccaattttttgggtctgatgtttcagagggcctctgtttcagggttgaagatgatatattaatctcggaattaaacaaatgctattaaataac

SEQ ID NO: 1786 - DNA, 7676 bp, HOMO SAPIENS
gccgcggacgcgatgctggttgctgcggctcgggcggcggggctggcggggatgtgacgggcggcccttcgtctcaccttccgtcctcgggcccgcaggtcgcagggcggcctgcagctgggccgcggccgaggaggcagcgcgacctccgcacgattctttcaacttttaagaacaaatgcaccttatagctcatggaagaaaaaacacaaatcaagacatttttgggttccaagttgccaaagtatggaacaaaatctgtaagaagtacattgcagccaatgccaaatgggacacctgttaatttattaggaacttccaagaatagtaatgtcaaaagttacatcaaaaataatggctctgattgtccatcatctcattcatttaattggaggaaagcaaataaatatcagctttgtgcacaaggtgtcgaagagcctaacaatactcaaaattcacatgataaaataattgatcctgaaaaacgtgttcctactcaaggaatgtttgataaaaatgggataaagggaggtttgaaaagtgtttctttattcacatcaaagttagcaaagccatccactatgtttgtgtcatctacagaggagttaaaccaaaagtctttttctggaccatctaatttgggtaaattcaccaaaggcacattattaggaaggacttcatattcttcgatcaatactccaaaatcacagttgaatggattttatggaaaccgatcagctggtagcatgcaaaggcctagagcgaactcctgtgccaccagaagcagttctggagaaagcttagctcaatccccagacagtagtaaatctattaattgtgaaaaaatggtaaggtcacaaagtttttcacattccattcagaattcattccttccaccttcatctataaccagatcacattcctttaatagagctgtggatcttacaaagccttatcagaaccaacagctatccattagagtgcctctacggtcaagtatgctaacaagaaattcccggcagccagaagtactcaatgggaatgaacatttggggtatggatttaataggccttatgctgctggtggaaagaagttggctttaccaaatggcccaggtgtaacttctactttaggttatagaatggttcatccctctctactgaaatctagccgatctccattttctgggactatgacagttgatggaaataaaaattcacctgctgacacatgtgtagaggaagatgctacagttttggctaaggacagagctgctaataaggaccaagaactgattgaaaatgaaagttatagaacaaaaaacaaccagaccatgaaacatgatgctaaaatgagatacctgagtgatgatgtggatgacatttccttgtcgtctttgtcatcttctgataagaatgatttaagtgaagactttagtgatgattttatagatatagaagactccaacagaactagaataactccagaggaaatgtctctcaaagaagagaaacatgaaaatgggccaccacaggatatgtttgattcccccaaggaaaatgaaaaagccttcagtaaaactgatgaatggatagatataagtgtctctgacaggagtgaatgtacaaaacatacttctgggaataatttggtttcaccagatacagactacagagctggttcttcgtttgaactctctccatctgatagctctgatggaacatacatgtgggatgaagaaggcttggaacccattggaaatgtccatccagttgggagctatgagtcctctgaaatgaacagcatagatattttgaataatcttgaatcatgtgaccttgaggatgatgatcttatgcttgatgtggatctgcctgaggatgcacctcttgaaaatgtggagtgtgacaatatgaaccgctttgaccgaccagacagaaatgttcggcagcctcaggaaggtttttggaaaaggccaccccagaggtggagtggacaggagcattaccacctcagccaccctgaccactatcatcaccatggaaaaagtgacttgagcagaggctctccctatagagaatctcctttgggtcattttgaaagctatggagggatgccctttttccaggctcagaagatgtttgttgatgtaccagaaaatacagtgatactggatgagatgacccttcggcacatggttcaggattgcactgctgtaaaaactcagttactcaaactgaaacgtctcctgcatcagcatgatggaagtggttcattgcatgatattcaactgtcattgccatccagtccagaaccagaagatggtgataaagtatataagaatgaagatttattaaatgaaataaaacaacttaaagacgaaataaagaaaaaagatgaaaagatccaactattagaacttcagcttgcaactcagcatatctgccaccaaaaatgtaaagaggaaaaatgcacttatgctgataaatatacccaaacaccctggagacgaattcctggtgggtattctgctccctccttctctccttggcagggctccttccaggggatcccacggactgttccaccgcaccgcagacagacctcaagtactacagccttccagcagccttcccagacccacagatcacacccagggaaaactaataaagccacaacgtatcgaggcccgcagtgaatgctcaatccaagacatgcatcagggcggtgcacatccggaagaaagctttacacacgtcttgcaccaagaaagcaactatggtttggaagagcagcctttttcatcaggcccacaattaacaatggatgtggctaagagtacaccttctgaagcaaacttaaacattactgtaaatgctcaagagccttatcatttggcaaacaatcaaattagtgacatgcagtttatacccacttctcttcagacacctcccgagtcaagtacagtagaccaggctaagagagttggaagaaatcagtctccgccagtgggttatatgtctcagcccaagtccttgcagcttttaaagccatccatattgagttctttggtaccgcctccagtttctgaatcatctccaagtaggactcccacttgtaaaaagtcaccaataatcacaacatgtaattcagcaaaacttcagccaacatctagtcaaacaaatcttgcaaataatcagaatctgaaagcatctaagctccgccccccctcaggctctttcaaacaaaaacaaacaaacagcccccaactagagcctcaaagcttccaggccaagacaagcatcccaaggccactaacacaacgaaaagaaatcatgcagaatccaaatggcaatttgcattctggggattgtttggcctctaatcgatattctcgtcttcctaaaccaaagatacattaagtacatagccatcacctgccaatttgtttcttaaaaacaatctcttctgtaatagctttatgtgcagcttgcagcttgctactgtggtggaggttccattgaaagcctgcaaatcttaaattaaaatgtggaagcttctactagtttggctccttcattttatatcctggttgaagtacatgccatttgagcataattatctcaggtaaacacgaaagtttgcttacccatttcagaggcctgccaaaggcccaaatcatgttatccatccctctccacgtcagaaaattcataatattttactgagcaggcaagaagtgtgctttgctggtttagtcctattaaggtctgtatttattgtggttgtcagaacctcaccccttttcacttgtctctcctgtgaatatggctactattttaactaaagatatggtgataatggaagatggtagtctgtaagcagagttctggccagtgttttgtatatttaaaaggtctatgcaaaagctttgtgatgaataaaggagattaggcttttaatggaaagtctatgtaagttttatttttccttgccagggtcagtcagctaatgttactgttgattcatttcccaaattccccagactgaaagtgtttcttattacatataaatcagttatatattcctttacatcttgttttacaaacacatgtgcatgcacacacacatatacacacacataccatttatgtttgtatttgttactgggtaaattttggagcgcttgagatacaccttgaaacctgtacctaaagatgtattcatttgtaacatatgttggtgctagagttttgctggtaattcaggcttgaacccttaggcttgtggatccatgatagccattttaaggttccacagcattatgtctttaattgtaatatttatatttattgattttctgctaatatctgaagactgaaataatgaacttgaaacatttgcacaaaactttgatggggtataaatataccatatatagggattgtaaactattttctatagcaaaacaagttaaaatattttgagaaaaataacaaatttaaataagactatcttgagaaagctggagttcataatattctccccctcccccatctccagtctcctaggtttcccttttctgtgttttttgtttttttctgtttgttttttgagacagagtcttgctccattgcccaggctggattacagtggcgcaatctcggctcactgcaacttctgcctcccgggttcaagcgattctcctgcctcagcctcctgagtagctgggactacaggcatgtgccaccatgcctggctaatttttttgtatttttagtagagatgagatttcaccttgttggtcaggctggtctcgaactcctgacctcaagtgatccacccacctcgtctatggtgtatttttgaaagacaattttttaaaggtagatttgggaaaaaaatagaattgaagatgggaaattttgttttattaaaaaggtgctagaagatgtttcaaagacaatattcttattttaatacgctgtagaaggtaggtgtggaacctccatgctaccatgtgcacaaacctaattatgctttgggtcacttgtcagttcagtaaatctgccttcctcttctcccaaatcatgtcatctttaggttgttcacctgcagctgctttaaatgaattagtatctttcagatagataaccttacaaggagaatgtttgttttgagcagctgaccaaaaatatatcaaacaggattatggccaaaaagtcactcaaatttctagagattcctttaaaagatgtatgttgatgaaattgcccctttataagaaaaacaacagcaagtcttttagtagaaatttgaaagaagtgtttgctaccattttgacccattattcccttacctatcagatgaatttgccattcactggatagaaaccattcttggatttggtaagaggtgagcaagacaaatcttgtaccatactcttatgtaccagcacttctgatggagaagcagtgaagttcagaacgttcttcacatagtccagatactgttagagtcaggcaaatcagcaaagcactttgttatggagatgacccatgatggctgcagttgtaagtgggcatacatgttctatcattttgaaggagaaagaaaaccgttctcacatgttgcaaatatgtgaatcatactatattcccctaaagtaaaaccagtgacttagtggtttttggtttatttagaagttggtttagacccttatgaaacattatttacgagttggccttatccttaagggaaaagttctaaatttttaaatttatttttaattccctagtctgagggaaatgtctttattgtccattacataaaaatgttgactccagtaatttatttttctctattttttcctccatgtatttactccatttttctctattttttccttccctgatggatttgcagaaatgttaaccaattagctcaacttttctctacctttgttgagtcttaatcttttagaagataggcttatcgtatatttatgaagcataatatattaaaagaaaacaaatctaggatgcttgcatgacataaagtatttgcctgcagttttcattaaaaactgcaagaatatcatgcttgtctgcttcttagtaaatgttaagtctgaaatggaagtgaggatgtaactctactgaataatcaaagatcatcttagatttggcttgatctgtgtttattgcttctattaatgtaaatcaactctgtgccaaatcctcctccacaaaccatttattgtcttagttctagtggtatcaatgaagatagttacagtatatgaattctaagtcctgaggaagaaattttatggggtttgttaagtttcacattcgtgaaagaggaaattagtagagtattcagactttgatatttggctgttaatgggatgcatatcaaatttttaaaagaaggcttggcctaaggagtttattggtacaggtgcagatgattttaaggcattaaaggattatagagttatgtcatttagactgtttctaataactgagaccatctaacatttttcttttggagtctcatttttatttgtgcaatattttcaggcatataggctactgttcattgtatttatatatatattagaatttactaagtactttaacaagtaaaaatctgaatatgaaagaaaatatcagatttgcactttaaatgagcttaattgcttgaagttgtgcctgaaatatcgaattgcctcctattgggtgtggctttgttgaaataaatttgtaattgttgctgtttgaagatatcagtacagctgttcacagaaatatattcccagcatgtcacttttccattaaagcactaagttttctttgaatgttccattgttccgataagtattttacttttttctcagtacatcagagagagcgtgatccccctacagctgtcacttccaaatgttcctgtagcataaatggtgttacagacactgaggtgcactcttggtttctgagcagagttgtcatactggtttcctggtctctagggcactggggatgtactttgaaatcaccgaacaggcttgcaattaagatcaataaggctgcagcaccatttcaatttactttccatcttacccagtagtttttgtgtttttaaattcgtttgggtggttatgtttgcatgcttaagcacacatttgaaaattaattatagctgtactacccgatgtttttccttggggatgatggccttgttcctttttaaattctgatgcttgaattctattttctagtgatttttcacatctccctttaagtttttgctgcagcaatttgagagagtacttttgattaaatgattctgatggtgggcaccaatctacaactatgtcattaactgaagatacatgttttaatcttgttgggaataagcttacccactttctccttggtaaagcgtttacttaacaaaataatacccgagaatgtaaggtctctaagtcattactaacaaagagcaaaaataatatctgcagtattgtttttcccattgattttaagtcagtttagagtacaaactgtatattagaatttgcctgtaaaatgaattctaaaaagcagatgtaaagtctctcctgaaaatgttggcatagtaaataaaaataaagttcataattataaaagtt

SEQ ID NO: 1787 - DNA, 6895 bp, HOMO SAPIENS
ttccagttacagctatatcagagaatgagttaatctcctcagaaatcactaaatactactctgaggggcttagaaattaacaggttgtttatataattggccttaaatgaggtgagagtgaagagactagagccatctctggaaaacatcattatcccattccccgggaagctaccctctggaactcaagatttgaccatatctgttttgaggattcattatgaacaaagaagtctcccaggtgtgaagtttttcaacatgagtggcctcggggacagttcatccgaccctgctaacccagactcacataagaggaaaggatcgccatgtgacacactggcatcaagcacggaaaagaggcgcagggagcaagaaaataaatatttagaagaactagctgagttactgtctgccaacattagtgacattgacagcttgagtgtaaaaccagacaaatgcaagattttgaagaaaacagtcgatcagatacagctaatgaagagaatggaacaagagaaatcaacaactgatgacgatgtacagaaatcagacatctcatcaagtagtcaaggagtgatagaaaaggaatccttgggacctcttcttttggaggctttggatggatttttctttgttgtgaactgtgaagggagaattgtatttgtgtcagagaatgtaaccagctacttaggttacaatcaggaggaattaatgaatacgagcgtctacagcatactgcacgtgggggatcatgcagaatttgtgaagaatctgctaccaaaatcactagtaaatggagttccttggcctcaagaggcaacacgacgaaatagccatacctttaactgcaggatgctaattcaccctccagatgagccagggaccgagaaccaagaagcttgccagcgttatgaagtaatgcagtgtttcactgtgtcacagccaaaatcaattcaagaggatggagaagatttccagtcatgtctgatttgtattgcacggcgattacctcggcctccagctattacgggtgtagaatcctttatgaccaagcaagatactacaggtaaaatcatctctattgatactagttccctgagagctgctggcagaactggttgggaagatttagtgaggaagtgcatttatgcttttttccaacctcagggcagagaaccatcttatgccagacagctgttccaagaagtgatgactcgtggcactgcctccagcccctcctatagattcatattgaatgatgggacaatgcttagcgcccacaccaagtgtaaactttgctaccctcaaagtccagacatgcaacctttcatcatgggaattcatatcatcgacagggagcacagtgggctttctcctcaagatgacactaattctggaatgtcaattccccgagtaaatccctcggtcaatcctagtatctctccagctcatggtgtggctcgttcatccacattgccaccatccaacagcaacatggtatccaccagaataaaccgccagcagagctcagaccttcatagcagcagtcatagtaattctagcaacagccaaggaagtttcggatgctcacccggaagtcagattgtagccaatgttgccttaaaccaaggacaggccagttcacagagcagtaatccctctttaaacctcaataattctcctatggaaggtacaggaatatccctagcacagttcatgtctccaaggagacaggttacttctggattggcaacaaggcccaggatgccaaacaattcctttcctcctaatatttcgacattaagctctcccgttggcatgacaagtagtgcctgtaataataataaccgatcttattcaaacatcccagtaacatctttacagggtatgaatgaaggacccaataactccgttggcttctctgccagttctccagtcctcaggcagatgagctcacagaattcacctagcagattaaatatacaaccagcaaaagctgagtccaaagataacaaagagattgcctcaattttaaatgaaatgattcaatctgacaacagctctagtgatggcaaacctctggattcagggcttctgcataacaatgacagactttcagatggagacagtaaatactctcaaaccagtcacaaactagtgcagcttttgacaacaactgccgaacagcagttacggcatgctgatatagacacaagctgcaaagatgtcctgtcttgcacaggcacttccaactctgcctctgctaactcttcaggaggttcttgtccctcttctcatagctcattgacagaacggcataaaattctacaccggctcttacaggagggtagcccctcagatatcaccactttgtctgtcgagcctgataaaaaggacagtgcatctacttctgtgtcagtgactggacaggtacaaggaaactccagtataaaactagaactggatgcttcaaagaaaaaagaatcaaaagaccatcagctcctacgctatcttttagataaagatgagaaagatttaagatcaactccaaacctgagcctggatgatgtaaaggtgaaagtggaaaagaaagaacagatggatccatgtaatacaaacccaaccccaatgaccaaacccactcctgaggaaataaaactggaggcccagagccagtttacagctgaccttgaccagtttgatcagttactgcccacgctggagaaggcagcacagttgccaggcttatgtgagacagacaggatggatggtgcggtcaccagtgtaaccatcaaatcggagatcctgccagcttcacttcagtccgccactgccagacccacttccaggctaaatagattacctgagctggaattggaagcaattgataaccaatttggacaaccaggaacaggcgatcagattccatggacaaataatacagtgacagctataaatcagagtaaatcagaagaccagtgtattagctcacaattagatgagcttctctgtccacccacaacagtagaagggagaaatgatgagaaggctcttcttgaacagctggtatccttccttagtggcaaagatgaaactgagctagctgaactagacagagctctgggaattgacaaacttgttcaggggggtggattagatgtattatcagagagatttccaccacaacaagcaacgccacctttgatcatggaagaaagacccaacctttattcccagccttactcttctccttctcctactgccaatctccctagccctttccaaggcatggtcaggcaaaaaccttcactggggacgatgcctgttcaagtaacacctccccgaggtgctttttcacctggcatgggcatgcagcccaggcaaactctaaacagacctccggctgcacctaaccagcttcgacttcaactacagcagcgattacagggacaacagcagttgatacaccaaaatcggcaagctatcttaaaccagtttgcagcaactgctcctgttggcatcaatatgagatcaggcatgcaacagcaaattacacctcagccacccctgaatgctcaaatgttggcacaacgtcagcgggaactgtacagtcaacagcaccgacagaggcagctaatacagcagcaaagagccatgcttatgaggcagcaaagctttgggaacaacctccctccctcatctggactaccagttcaaatggggaacccccgtcttcctcagggtgctccacagcaattcccctatccaccaaactatggtacaaatccaggaaccccacctgcttctaccagcccgttttcacaactagcagcaaatcctgaagcatccttggccaaccgcaacagcatggtgagcagaggcatgacaggaaacataggaggacagtttggcactggaatcaatcctcagatgcagcagaatgtcttccagtatccaggagcaggaatggttccccaaggtgaggccaactttgctccatctctaagccctgggagctccatggtgccgatgccaatccctcctcctcagagttctcttctccagcaaactccacctgcctccgggtatcagtcaccagacatgaaggcctggcagcaaggagcgataggaaacaacaatgtgttcagtcaagctgtccagaaccagcccacgcctgcacagccaggagtatacaacaacatgagcatcaccgtttccatggcaggtggaaatacgaatgttcagaacatgaacccaatgatggcccagatgcagatgagctctttgcagatgccaggaatgaacactgtgtgccctgagcagataaatgatcccgcactgagacacacaggcctctactgcaaccagctctcatccactgaccttctcaaaacagaagcagatggaacccagcaggtgcaacaggttcaggtgtttgctgacgtccagtgtacagtgaatctggtaggcggggacccttacctgaaccagcctggtccactgggaactcaaaagcccacgtcaggaccacagaccccccaggcccagcagaagagcctccttcagcagctactgactgaataaccacttttaaaggaatgtgaaatttaaataatagacatacagagatatacaaatatattatatatttttctgagatttttgatatctcaatctgcagccattcttcaggtcgtagcatttggagcaaaaaaaaaaaaaaaaaaaaaaaaaggagtttgcttttgtcgggagattgaaagatgtttttgtttctttctttgtaaaggccttggatattgaaaaaataccaaggcagaacagttggacaatctatttcttgagccaaatttaattattcttatttttgtaatcagtcattggcttcttatctggatgaaggcttttggaggagaaccaaaacgacaagttccaagaagaagatgaagctccgcctccgccgcttagtcccaaccctgcccaggaagaagggcccgtggggctttgcctgtgcccgtccaccaaaggctgtcatgtgtctcgaaatcagcagccctccccatcccaatcccaggcagcttgtgtgtacaatcagcttctctagcaactctgtatctgttggcttcaagagaatattttgcctccacatatgtaccccttctcctttttttaaagatggatttaaaccaagatgcctccaggaaagaggacgaaatgagtatattcacagaggaatccaaaaaatacagtttgggggaaaatgcaataatttttgatgagatgggtgaaggacaagaagtgagttgtgtcaattattgtagatacaattttctgattaaatctggaaaaataaaaggcagcctgttttttctgcttttattgtattaacagctgaggtagctaaagttatttaaaataaaattaaatttatgatccaagtagcttatttttccctttaaatctcattgtaaatatatttgatttcttgtagaaattgatttccttctgtttaattttatgcttttattatactcttgatttttctaaatttgtgtgtgaaatataacattgattgaattgcagttacatttggttagtaatatttcattattttaataactgtgatgtcatgtatggatttactttggggttcaaatcaaaatgtcactgccagaaagagctgttccagctgatctagagcatactgccctagagtgtccctgggatcatctgaacagaagtgcacaggctacttgtacagagaaaaaattaatactcaaaggaaatcttcattttttagattgactttgggaatttgaattttcatcagtgcaaatataaatttctctatcctgctctgaggctaattggtaccatattttccctttgtgtcttgtgactctgccacatcccatctcatcctggcctctgagtcaagaacccagtgaactgactttctagttctagaagttccgctgcaaggccaggaaagcttgagaaaggtattgtggaagaagcaaaggtagacccccatcactcacctttgtctgcatccctgggcctgtgaatgatgacagcacctgacattctgcaccagctacctctgcctccatggcagagaaaaggccataagaacagtggaagaggagcatggactcagacttcaaggaagaagccatttccccaggtccttccttctgcatctcaccacccctagttacaaataactccattgaacagcatctattcagaaactatgccgaataaaaagattggtggaagggctcatgtggttagcaactatgaaacagaaataggacactcagttacaaacattatctcctttagtttttcagaaaatgcatccctgatttcattcatttccagcttgaaagccagccatattactctagtccctaccaaactgctctagaaggtcatttccattttgtttgtgatatttagacgcgcagacttcaggaagttcacctttaacttcagcattccagatgaagtttcctgactcagtgcttttgcataaggaactagaaaaaaaaagtaaggaaaattggagatgctaacatcctcccccatcccaactgcaccttaaaatatgcatgtcaccttcaaggttttataattgcactgtttgttttatgtatgtacagattaaaattattgctacatttgaggaaaataaaattgcttgcttctatgtaattcctgtcattccacaggaaattcacttttccagctactgaatagaatttgtttaacaacctcatgggttgcctcttcatttacagggaagaaatgaaatgtacatctgcagaaattgccaaagcccaaattaacgagtattataaaaggataataaagcatccctgaagccaaa

SEQ ID NO: 1788 - DNA, 4342 bp, HOMO SAPIENS
gggtctgaggtttggtgactgcggggcaggccgggggcagctgtctgtctggctctttttgacagcccccagtgcgaaaggctgccagcatgtcatcagtgagccccatccagatccccagtcgcctcccgctgctgctcacccacgagggcgtcctgctgcccggctccaccatgcgcaccagcgtggactcggcccgcaacctgcagctggtgcggagccgccttctgaagggcacgtcgctgcaaagcaccatcctgggcgtcatccccaacacgcctgaccccgccagcgacgcgcaggacctgccgccgctgcacaggattggcacagctgcactggccgttcaggttgtgggcagtaactggcccaagccccactacactctgttgattacaggcctatgccgtttccagattgtacaggtcttaaaagagaagccatatcccattgctgaagtggagcagttggaccgacttgaggagtttcccaacacctgtaaaatgagggaggagctaggagaactatcagagcagttttacaaatatgcagtacaattggttgaaatgttggatatgtctgtccctgcagttgctaaattgagacgtcttttagatagtcttccaagggaagctttaccagacatcttgacatcaattatccgaacaagcaacaaagagaaactccagattttagatgctgtgagcctagaggagcggttcaagatgactataccactgcttgtcagacaaattgaaggcctgaaattgcttcaaaaaaccagaaaacccaagcaagatgatgataagagggttatagcaatacgccctattaggagaattacacatatctcaggtactttagaagatgaagatgaagatgaagataatgatgacattgtcatgctagagaaaaaaatacgaacatctagtatgccagagcaggcccataaagtctgtgtcaaagagataaagagactcaaaaaaatgcctcagtcaatgccagaatatgctctgactagaaattatttggaacttatggtagaacttccttggaacaaaagtacaactgaccgcctggacattagggcagcccggattcttctggataatgaccattacgccatggaaaaattgaagaaaagagtactggaatacttggctgtcagacagctcaaaaataacctgaagggcccaatcctatgctttgttggccctcctggagttggtaaaacaagtgtgggaagatcagtggccaagactctaggtcgagagttccacaggattgcacttggaggagtatgtgatcagtctgacattcgaggacacaggcgcacctatgttggcagcatgcctggtcgcatcatcaacggcttgaagactgtgggagtgaacaacccagtgttcctattagatgaggttgacaaactgggaaaaagtctacagggtgatccagcagcagctctgcttgaggtgttggatcctgaacaaaaccataacttcacagatcattatctaaatgtggcctttgacctttctcaagttctttttatagctactgccaacaccactgctaccattccagctgccttgttggacagaatggagatcattcaggttccaggttatacacaggaggagaagatagagattgcccataggcacttgatccccaagcagctggaacaacatgggctgactccacagcagattcagataccccaggtcaccactcttgacatcatcaccaggtataccagagaggcaggggttcgttctctggatagaaaacttggggccatttgccgagctgtggccgtgaaggtggcagaaggacagcataaggaagccaagttggaccgttctgatgtgactgagagagaaggttgcagagaacacatcttagaagatgaaaaacctgaatctatcagtgacactactgacttggctctaccacctgaaatgccgattttgattgatttccatgctctgaaagacatccttgggcccccgatgtatgaaatggaggtatctcagcgtttgagtcagccaggagtagcaataggtttggcttggactcccttaggtggagaaatcatgttcgtggaggcgagtcgaatggatggcgagggccagttaactctgaccggccagctcggggacgtgatgaaggagtccgcccacctcgctatcagctggctccgcagcaacgcaaagaagtaccagctgaccaatgcttttggaagttttgatcttcttgacaacacagacatccatctgcacttcccagctggagctgtcacaaaagatggaccatctgctggagttaccatagtaacctgtctcgcctcactttttagtgggcggctggtacgttcagatgtagccatgactggagaaattacactgagaggtcttgttcttccagtgggtggaattaaagacaaagtgctggcggcacacagagcgggactgaagcaagtcattattcctcggagaaatgaaaaagaccttgagggaatcccaggcaacgtacgacaggatttaagttttgtcacagcaagctgcctggatgaggttcttaatgcagcttttgatggtggctttactgtcaagaccagacctggtctgttaaatagcaaactgtaggtccaaatctcaattttttagaattttaagttatgaagtgctcaaaggtactgacacagttgattttattcacaccattaggggtatgcaagatgtccctgttttataaacataatcacaacagtaataaacctcaagtagtggctagtgtttagtatagaaatataagatgttgatttagtaaactgataaaaatcgaattcttgtctttttagtgggatccttactgtccctggaaagatatagcatagtggttctcagcacagtctccagaacagaagcatctgtagtacctggtaacttgttagaaatgtacattctcaggctccacagcaggccgcctgaatcaaatcctgggaggtggggacagaaatctgtgttttaagaagccttccaggtaattctgctgcacactcaagttcaggaaccaccggtatagaccattaccttagtggatttacctgtagagtttattggatcctgaaaccaatcaattacttagaactaggcaaagatgaaagtatagccaactattcttggctatatatatatattcaagtgggccgggcgtgatggctcacacctgtaattccagcactttgggaggtcgaggtaggcagatcaccgagcccaagagttcaagacaatcctggccaacggcgaaactctgtctctacaaaaaatatacaggcgtgttagcatgtgcctgtaatcccagcttcttgggaagctgaggcacaagaattgcctgaacccaggaggtggaggttgcagtgagctgggatcgcgccattgcactccagcctggctgacagagcgagactgtctctaaaaaaaaaagactcaagtggaccctacaatgaagcctacacatcccaatagaagccccttcttatgctgagggaagcagccctcagaacatgatagcttgtatccagcagagtggcacgtgctggcacacctcacagaagcaccctggccctggatgcctgcaacctcagaagagtgcagctcccagagggaggcagccatccatctgggatggtcctaagcatggaatcctaactcctgattccgtctcctatttcttgcttggctacgccagttcccaaatctggtagatgtccatgcccatgtgctcctgctgggactcaattcaggctatgtatgactatgaagtcaggctcatctgcttactggctgtgtgaactttttgtatcttggttttcttcatccatgaaatccaagtaatactacctaattgttactgtggagattaagttcaaatgcaatgtatagtaatattaagcaatttctagttattattctagccagtaatggacttcagaatcttttattacacaatataagaatatgtatgtaaagacattttggaatttcctggatgagaaggaagtctgggctgggcatggtggctcacccctgtaaccctagcactttaggaaatcgaggcgagtggatcacttaagctcaggagttcaaggccagcctgggcaacatggcaaaaccccatttctacaaaaaatacaaaaattagctgggcatggtggcacccgcctgtagtccagctacttgaggctgagatgggaggatgagggaggtcggggctgcagtgagccaagatcacgccactgcactccagcaccctgggcgacagagtgagaccctgtctc

SEQ ID NO: 1789 - DNA, 319 bp, HOMO SAPIENS
  misc_feature (143)..(143): n is a, c, g, or t
aatttcactgtttgctgagaagggtgtcttcctcctttcctccctttctctctccttcttttaatagcacaagcacaattgactatcatatgggataaaatgaatttgaatccttaggttactccatgtatgaaattcccccnaaattcaaggcttaggtgtaaaaatgaaaacaaaagtcttaaaagaaaatctgggctactatatataaaaaatgtatggattggcaggagcttcttaagcaaatctagagacccagaaatttaaatttttttttaaaaagacattatatcaaatgtagagtcttttgtccagtaaa

SEQ ID NO: 1790 - DNA, 1809 bp, HOMO SAPIENS
gtcttcctccctccctcccttcctcttactctcattcatttcatacacactggctcacacatctactctctctctctatctctctcagaatgacaattctaggtacaacttttggcatggttttttctttacttcaagtcgtttctggagaaagtggctatgctcaaaatggagacttggaagatgcagaactggatgactactcattctcatgctatagccagttggaagtgaatggatcgcagcactcactgacctgtgcttttgaggacccagatgtcaacatcaccaatctggaatttgaaatatgtggggccctcgtggaggtaaagtgcctgaatttcaggaaactacaagagatatatttcatcgagacaaagaaattcttactgattggaaagagcaatatatgtgtgaaggttggagaaaagagtctaacctgcaaaaaaatagacctaaccactatagttaaacctgaggctccttttgacctgagtgtcgtctatcgggaaggagccaatgactttgtggtgacatttaatacatcacacttgcaaaagaagtatgtaaaagttttaatgcacgatgtagcttaccgccaggaaaaggatgaaaacaaatggacgcatgtgaatttatccagcacaaagctgacactcctgcagagaaagctccaaccggcagcaatgtatgagattaaagttcgatccatccctgatcactattttaaaggcttctggagtgaatggagtccaagttattacttcagaactccagagatcaataatagctcaggggagatggatcctatcttactaaccatcagcattttgagttttttctctgtcgctctgttggtcatcttggcctgtgtgttatggaaaaaaaggattaagcctatcgtatggcccagtctccccgatcataagaagactctggaacatctttgtaagaaaccaagaaaaaatttaaatgtgagtttcaatcctgaaagtttcctggactgccagattcatagggtggatgacattcaagctagagatgaagtggaaggttttctgcaagatacgtttcctcagcaactagaagaatctgagaagcagaggcttggaggggatgtgcagagccccaactgcccatctgaggatgtagtcatcactccagaaagctttggaagagattcatccctcacatgcctggctgggaatgtcagtgcatgtgacgcccctattctctcctcttccaggtccctagactgcagggagagtggcaagaatgggcctcatgtgtaccaggacctcctgcttagccttgggactacaaacagcacgctgccccctccattttctctccaatctggaatcctgacattgaacccagttgctcagggtcagcccattcttacttccctgggatcaaatcaagaagaagcatatgtcaccatgtccagcttctaccaaaaccagtgaagtgtaagaaacccagactgaacttaccgtgagcgacaaagatgatttaaaagggaagtctagagttcctagtctccctcacagcacagagaagacaaaattagcaaaaccccactacacagtctgcaagattctgaaacattgctttgaccactcttcctgagttcagtggcactcaacatgagtcaagagcatcctgcttctaccatgtggatttggtcacaaggtttaaggtgacccaatgattcagctatttaaaaaaaaaagaggaaagaatgaaagagtaaaggaaatgattgaggagtgaggaaggcaggaagagagcatgagaggaaaaaaa

SEQ ID NO: 1791 - DNA, 2478 bp, HOMO SAPIENS
atcggccgccgttgcgcggcgcagagcggcagcaagatggcggcgcaacagcgggactgcgggggtgctgcgcagctggcggggccggcggcggaggctgaccccctaggacgcttcacgtgtcccgtgtgcttagaggtgtacgagaagccggtacaggtgccctgcggacacgtcttttgctctgcatgcctgcaggaatgtctgaagccgaagaagcctgtctgtggggtgtgtcgcagcgctctggcacctggcgtccgagccgtggagctcgagcggcagatcgagagcacagagacttcttgccatggctgccgtaagaatttcttcctgtccaagatccggtcccacgtggctacttgttccaaataccagaattacatcatggaaggtgtgaaggccaccattaaggatgcatctcttcagccaaggaatgttccaaaccgttacacctttccttgtccttactgtcctgagaagaactttgatcaggaaggacttgtggaacactgcaaattattccatagcacggataccaaatctgtggtttgtccgatatgtgcctcgatgccctggggagaccccaactaccgcagcgccaacttcagagagcacatccagcgccggcaccggttttcttatgacacttttgtggattatgatgttgatgaagaggacatgatgaatcaggtgttgcagcgctccatcatcgaccagtgagcagagtccgtgcttgctatctgtctcatgttacagagcttccattacatattaaacgtgaaatctatgactcctgtaccttacctgttcaacagacctgaaaatgagccatggcattgggacagggtcacttctgacaggggaagtgggtccccaggtcagcccttctcttccctttgggctcttgccaaagctgtcttcccctactgttaaccttgtttgtcacacggtcgagttcgtattggttctcggctacttcctggagcttctgccgcctcctgtggaagataatctagcttctccacctcttgtttcacactcattcctcccatccagtgtttgtctctcgggtccttcaagccagccaggaccttttctgggtcatgaatagcacaatgaagcaagtgtctcctttccttgtccccaaggtgtgcagactttggcagccgtgcacctgaccagagctgaagctcccgctgggctgtggggttgccagaagctggggttgccatcccggggtacatgtcaccagtcctcttggggttttgtaccatctgatgctggaagttttgattagtgatattttctactactacatatttagagttcactggttcagtcttaaatgcctgcatggtgcctttttaggataaggtataaccatacatttttggtggaagtgtttctgggttagggaagttaaagtctgtttatccgtaagtggggaggagggtcagctaagagaagtgggagggccagagctttttggttctgatttacaaattaatgaagtagtttcaaacaacgcggtcatgtttacctctccatttgggagcctgcctacattcttgttctagaagcacaaaaaatcctcagatgaattagaagaaagaggtttggggactcagcggatactagttcttttaccttctgcttggtaacttagattaaactgagcattgtttttctgtcacaaatgttttccttatgacactggtttcgacatgtaaaatgtgtttgaaaacctgctttgtagatgcagagagaagctataggaaacccagtaccacccctggtctgttctgacgagacatcgttcataaggcacagcacatcgcaagatgaacagttgttaataaaagctgttgctggaaacttgctttaggaacagctcaagaaccttggagttcatatttcacaaatattaataaatataagtccaagagctgtcagcctaatctgtaggagcagaacctctgattgaccaaaaggcatatgggtttaggttggttttttgatgtcatatgtctctgatggggctgcaagtgctacctcgcgcttgtacactgctgctgtggggctccgcgcctgccggtgaagagctgcagatgccgagaagccagcaaacacagggcccactggaaaaaaatagttttttcattagtatttctcgggaggacccaaaagttaaggtcagcttgttcactgtaatttctggaagaagttcactcagaccttcctgaattcagatcatctcagaagtctggagggaaatctggcgaaaccttcgtttgagggactgatgtgagtgtatgtccacctcactggtggcaccgagaaacttacttccttgtattaagtgcacttcttgtatttctaataagatgactttccagaaagtgagatttgttatgttctggcttttaaaaggtaaaatataaataaatttcataacttaatctaaaaaaaaaaaaa

SEQ ID NO: 1792 - DNA, 1791 bp, HOMO SAPIENS; identical to SEQ ID NO: 1616

SEQ ID NO: 1793 - DNA, 219 bp, HOMO SAPIENS
  misc_feature (37)..(37): n is a, c, g, or t
  misc_feature (39)..(39): n is a, c, g, or t
  misc_feature (80)..(80): n is a, c, g, or t
  misc_feature (113)..(113): n is a, c, g, or t
  misc_feature (117)..(117): n is a, c, g, or t
ccccttacacaatatggcgattccaggaccctgttcncnagcacagccatctgcatctattctgactggcaagtgttcantgcggtgcttgttatttaaatattctgaatatnaccntctgccacagccattaaagaaatggaaaaaatgagttaaaaactacctacagtactaataaaagagcaggtctgtcagttttacaggtgacttctaccaaat

SEQ ID NO: 1794 - DNA, 2671 bp, HOMO SAPIENS
ggacccgcctcagccaatccgctgctgccggcgtcgggtgcgctcggcctcgcccgcggccctccttccccggctcccgctcgccgctcgttcactccaccgccgccgccgccgccgccgctgccgctgccgctgccgcacctccgtagctgactcggtactctctgaagatggcagaagctcaccaagctgtggcctttcagttcacggtcactccggacgggattgacctgcggctgagccatgaagctcttagacaaatctatctctctggacttcattcctggaaaaagaagttcatcagattcaagaacggcatcatcactggcgtgtacccggcaagcccctccagttggcttatcgtggtggtgggcgtgatgacaacgatgtacgccaagatcgacccctcgttaggaataattgcaaaaatcaatcggactctggaaacggccaactgcatgtccagccagacgaagaacgtggtcagcggcgtgctgtttggcaccggcctgtgggtggccctcatcgtcaccatgcgctactccctgaaagtgctgctctcctaccacgggtggatgttcactgagcacggcaagatgagtcgtgccaccaagatctggatgggtatggtcaagatcttttcaggccgaaaacccatgttgtacagcttccagacatcgctgcctcgcctgccggtcccggctgtcaaagacactgtgaacaggtatctacagtcggtgaggcctcttatgaaggaagaagacttcaaacggatgacagcacttgctcaagattttgctgtcggtcttggaccaagattacagtggtatttgaagttaaaatcctggtgggctacaaattacgtgagcgactggtgggaggagtacatctacctccgaggacgagggccgctcatggtgaacagcaactattatgccatggatctgctgtatatccttccaactcacattcaggcagcaagagccggcaacgccatccatgccatcctgctttacaggcgcaaactggaccgggaggaaatcaaaccaattcgtcttttgggatccacgattccactctgctccgctcagtgggagcggatgtttaatacttcccggatcccaggagaggagacagacaccatccagcacatgagagacagcaagcacatcgtcgtgtaccatcgaggacgctacttcaaggtctggctctaccatgatgggcggctgctgaagccccgggagatggagcagcagatgcagaggatcctggacaatacctcggagcctcagcccggggaggccaggctggcagccctcaccgcaggagacagagttccctgggccaggtgtcgtcaggcctattttggacgtgggaaaaataagcagtctcttgatgctgtggagaaagcagcgttcttcgtgacgttagatgaaactgaagaaggatacagaagtgaagacccggatacgtcaatggacagctacgccaaatctctactacacggccgatgttacgacaggtggtttgacaagtcgttcacgtttgttgtcttcaaaaacgggaagatgggcctcaacgctgaacactcctgggcagatgcgccgatcgtggcccacctttgggagtacgtcatgtccattgacagcctccagctgggctatgcggaggatgggcactgcaaaggcgacatcaatccgaacattccgtaccccaccaggctgcagtgggacatcccgggggaatgtcaagaggttatagagacctccctgaacaccgcaaatcttctggcaaacgacgtggatttccattccttcccattcgtagcctttggtaaaggaatcatcaagaaatgtcgcacgagcccagacgcctttgtgcagctggccctccagctggcgcactacaaggacatgggcaagttttgcctcacatacgaggcctccatgacccggctcttccgagaggggaggacggagaccgtgcgctcctgcaccactgagtcatgcgacttcgtgcgggccatggtggacccggcccagacggtggaacagaggctgaagttgttcaagttggcgtctgagaagcatcagcatatgtatcgcctcgccatgaccggctctgggatcgatcgtcacctcttctgcctttacgtggtgtctaaatatctcgctgtggagtcccctttccttaaggaagttttatctgagccttggagattatcaacaagccagacccctcagcagcaagtggagctgtttgacttggagaataacccagagtacgtgtccagcggagggggctttggaccggttgctgatgacggctatggtgtgtcgtacatccttgtgggagagaacctcatcaatttccacatttcttccaagttctcttgccctgagacggggattataagtcaaggaccaagttcagatacttgagacaaagtggaaagtctcagcatatggaaacaaggccttggaggagaccatggacatcaccaagttcatgtgctgggctggaaagaaaagcctgttgattttcacttgctgtgcatttattcatccattccattgcctcaatgctgagaacagtgcctgacacataaaagatgctcaataaatatgttaaaagtaaaaaaaaaaaaaaaaaaaaaaaaaaaaaaaaaaaa

SEQ ID NO: 1795 - DNA, 4744 bp, HOMO SAPIENS
tccggtcctagggtcacacccaccgcagggtctggcttggtacagttgggtgcatgcagaagtaggtggagctgctgttgcagccttgagagagttttattgtaaaactcttgtaatttatagtaatcggaggggaaaacacctcttccttttaattgctctgaggaccgctgccaaagaaacgcagtagatccgctccctcttgggggcggggagaaagaacgggttgtgtccgccatgttggtgaagtcaagcgaaggcgactagagctccaggagggccagttctgtgggctctagtcggccatattaataaagagaaagggaaggctgaccgtccttcgcctccgcccccacatacacaccccttcttcccactccgctctcacgactaagctctcacgattaaggcacgcctgcctcgattgtccagcctctgccagaagaaagcttagcagccagcgcctcagtagagacctaagggcgctgaatgagtgggaaagggaaatgccgaccaattgcgctgcggcgggctgtgccactacctacaacaagcacattaacatcagcttccacaggtttcctttggatcctaaaagaagaaaagaatgggttcgcctggttaggcgcaaaaattttgtgccaggaaaacacacttttctttgttcaaagcactttgaagcctcctgttttgacctaacaggacaaactcgacgacttaaaatggatgctgttccaaccatttttgatttttgtacccatataaagtctatgaaactcaagtcaaggaatcttttgaagaaaaacaacagttgttctccagctggaccatctaatttaaaatcaaacattagtagtcagcaagtactacttgaacacagctatgcctttaggaatcctatggaggcaaaaaagaggatcattaaactggaaaaagaaatagcaagcttaagaagaaaaatgaaaacttgcctacaaaaggaacgcagagcaactcgaagatggatcaaagccacgtgtttggtaaagaatttagaagcaaatagtgtattacctaaaggtacatcagaacacatgttaccaactgccttaagcagtcttcccttggaagattttaagatccttgaacaagatcaacaagataaaacactgctaagtctaaatctaaaacagaccaagagtaccttcatttaaatttagcttgcacagagcttgatgcctatccttcattcttttcagaagtaaagataattatggcacttatgccaaaattcattatttaataaagttttacttgaagtaacattactgaatttgtgaagacttgattacaaaagaataaaaaacttcatatggaaattttatttgaaaatgagtggaagtgccttacattagaattacggacttaaaaattttgctaataaattgtgtgtttgaaaggtgttttttgtttttgtctttttaaactactgttaaaagaacagcttatgataagtaatatgtttaacttagagaagaattttttcctgtaccaaagttggcatattgcattctaaataagatgctaaataagagttaaccaacattcaacatgaccttaaaactgctgggttttgtattaattaaattataattggcactgtgatttgaaaaatttatagaaaaaaaggtacagggcaagtttttaaattaaaactttctatattttgttttaccagtaaaagtgagcttatcatggcctctctcataagaatgattttaaaataggttgtaaaatattttgaaaatatttgaatgtgaagtaccattgagtcatccaaactaggtaaggcctcaagtactttaaactagtaaaatctagtagctgataatattcacctaagtaagtgttgtaaaataattcagagttcaggacctagcttagataaatgtatactactctttttctcatagtaaaaatcttacatttccaacttcaaaattggtgcttccatatttgttgataaccaaaactcctaaggttttttgttttctttttaactactttccaaatgcatactatacctcagaaatagtgtatcaatatagtgggctttttttttcctcttcataaacccacagtaaaatttaatcacaggaaactacttatatcttcacactttgtattgataacttaaaatggcatcagtttatcttagacatcagcttgctttttatctccttttttagtgagtgaaatagagcaactagcatgcctgtgttcccagctacttgggaggctaaggtgggaagatcaattgaacctaggaggttgaggctatagtgagctgtgattgcacgactgcactccagcctgggcaatggagtgagactcctgtctctaaaacagcaacaacaaaaataaagcaaccatagtgcataagggaaattaaatgttccctatagaaatatgtgtatgtctgtgatagtggtatgcaaatgctaattattttataaaataaaagttcagaactattcttatcattgccacttgaacaattaaagggtttgctttatttcactaatgtttaataggaaccctttgcttcaaacagctttgttgaaatcatgtaaaaatttgttaatagagaatcaagttatttaactcaacttatttaattcaagcttgtgatactaacatacaaaggtagcataaaccaagtcataaattgctgtaatctttcctgtagagtaatagctacttcatgatttttttaaaaatttcatttttttgctatttaggattgcatttgcttggctcctagtaacaattcttttacagtattagcactctctttactaaggaatgcctcccaaggaaatgcaaaggtaggaaaagtctcttagaatgcccatgaggtatttaaaacagatatttatgaaaatctttttgtgaatgttataaatcttgctagttattttatctttatcttaagtattagatgtagttccttggaattgtcattacatatttatttttttctagtgtggtttcaaataactttttgccaacatataatcatcatcaaacattcactgaccatatctattttataactcaaaataagttggacaaataatcattttaataaaaactattttttccaagtataaccactgtcatgtggttcacccttcaccccagatacaaaacacttatttgtgtagcccagttcccatctacagtaataccttgaaaccttaataaattttaaaaatcataaaaataaaatattgtaaaatacaacaaattttggacaaggttacttcatcttcattcattattacctgacagtattaaactactactcaataattttagagtaaacttttctgtgttttccccgtgattttcattgtgctgtcctgacaacatgctccaaactctttgcatcaaattgttttattaacatacatttgtctaccttaaaactagctttattcacagagaaagacctaaaaggagtctattaaaatgctgctttcagtttgatagttttttttttaatcactctgaccataaactaactgaaattataatggattttttttcctctcccggtcacaacacagatcttctgttcatttgttctctgtctactgggcaccaacctctacaaagaaccagccaaaggctaggtacttgatataaaaaggaatattacattattttctgccctcaagttgctctatctcctgaaagaaacaagtaatatttataatacaatatgataaatgctacaaaagaaatagctgtaaagtcctttggtaaatgctgttgaattggaattcagtaagaactataaactgtagacctttttataatcaaatgcttttgtcttgaaacaaaacagattcctccttatattgacttagcaaaggaggtacaaggacattggcatttgacctgaattatggtgttttattgaatgagctataagacaacatttttaccctttaaaatgaacactgaacaaatgtgttaatggtatctttgttaaaaggaaaacatagctataaataaaatactacatcgaaatccagcactggagttcatttgaaatttgatattttgtgtaaagtaacaaacctattaacacagatttttaaaataactcagaatcgtataaagcactttggtacttatttgttctcttttcccttacattctgtgtggtaggtggtattatctctgatttacacatgaagacatccttgttaatgcaatttatttattcattcgggcatttactgtgtgccaacttgcaaaaggaatagaaatgtctgtgatctagatagttctagattgaacatagattttctgccaacaaatcctctctgctgttcacattatcctttgtttaacgtatgaaccaggttactaaaataggataaatcatgtgtcttagaatatgaaaatagtaaggtctttgaggtcacttgatcttctctaagtagactttataatattgtgttttatctcatttctcaatattagaatacgggtagattttaattttgctataatataggaaatggttcatctttgtaccaaaatattgcattcttctgatatttagacagttggaaactttctaaaattgaggattttgtagtgtatactaaataattgcatattcaaaaaaatgtattctgagtatggtgatattaaacatttttccccaaaaaaaaaaaaaaaaaaaaaa

SEQ ID NO: 1796 - DNA, 2117 bp, HOMO SAPIENS; identical to SEQ ID NO: 474

SEQ ID NO: 1797 - DNA, 3981 bp, HOMO SAPIENS
cgacaggggcggctctttcctgggtggggtttgtgaagtcgtggcccgttagcaggaagcctaacagtcgccccgacgctagtgagggacccaatctgagtccccggccagccgaatccaagccgtgtgtactgcgtgctcagcactgcccgacagtcctagctaaacttcgccaactccgctgcctttgccgccaccatgcccaaaacgatcagtgtgcgtgtgaccaccatggatgcagagctggagtttgccatccagcccaacaccaccgggaagcagctatttgaccaggtggtgaaaactattggcttgagggaagtttggttctttggtctgcagtaccaggacactaaaggtttctccacctggctgaaactcaataagaaggtgactgcccaggatgtgcggaaggaaagccccctgctctttaagttccgtgccaagttctaccctgaggatgtgtccgaggaattgattcaggacatcactcagcgcctgttctttctgcaagtgaaagagggcattctcaatgatgatatttactgcccgcctgagaccgctgtgctgctggcctcgtatgctgtccagtctaagtatggcgacttcaataaggaagtgcataagtctggctacctggccggagacaagttgctcccgcagagagtcctggaacagcacaaactcaacaaggaccagtgggaggagcggatccaggtgtggcatgaggaacaccgtggcatgctcagggaggatgctgtcctggaatatctgaagattgctcaagatctggagatgtatggtgtgaactacttcagcatcaagaacaagaaaggctcagagctgtggctgggggtggatgccctgggtctcaacatctatgagcagaatgacagactaactcccaagataggcttcccctggagtgaaatcaggaacatctctttcaatgataagaaatttgtcatcaagcccattgacaaaaaagccccggacttcgtcttctatgctccccggctgcggattaacaagcggatcttggccttgtgcatggggaaccatgaactatacatgcgccgtcgcaagcctgataccattgaggtgcagcagatgaaggcacaggcccgggaggagaagcaccagaagcagatggagcgtgctatgctggaaaatgagaagaagaagcgtgaaatggcagagaaggagaaagagaagattgaacgggagaaggaggagctgatggagaggctgaagcagatcgaggaacagactaagaaggctcagcaagaactggaagaacagacccgtagggctctggaacttgagcaggaacggaagcgtgcccagagcgaggctgaaaagctggccaaggagcgtcaagaagctgaagaggccaaggaggccttgctgcaggcctcccgggaccagaaaaagactcaggaacagctggccttggaaatggcagagctgacagctcgaatctcccagctggagatggcccgacagaagaaggagagtgaggctgtggagtggcagcagaaggcccagatggtacaggaagacttggagaagacccgtgctgagctgaagactgccatgagtacacctcatgtggcagagcctgctgagaatgagcaggatgagcaggatgagaatggggcagaggctagtgctgacctacgggctgatgctatggccaaggaccgcagtgaggaggaacgtaccactgaggcagagaagaatgagcgtgtgcagaagcacctgaaggccctcacttcggagctggccaatgccagagatgagtccaagaagactgccaatgacatgatccatgctgagaacatgcgactgggccgagacaaatacaagaccctgcgccagatccggcagggcaacaccaagcagcgcattgacgaatttgagtctatgtaatgggcacccagcctctagggacccctcctccctttttccttgtccccacactcctacacctaactcacctaactcatactgtgctggagccactaactagagcagccctggagtcatgccaagcatttaatgtagccatgggaccaaacctagccccttagcccccacccacttccctgggcaaatgaatggctcactatggtgccaatggaacctcctttctcttctctgttccattgaatctgtatggctagaatatcctacttctccagcctagaggtactttccacttgattttgcaaatgcccttacacttactgttgtcctatgggagtcaagtgtggagtaggttggaagctagctcccctcctctcccctaccactgtcttcttcagggtcctgagatttacacggttggagtgttatgcggtctagggaatgagacaggacctaggatatcttctccaggatgtcaactgacctaaaatttgccctcccatcccgtttagagttatttaggctttgtaacgattgggggataaaaagatgttcagtcatttttgtttctacctcccagatcggatctgttgcaaactcagcctcaataagccttgtcgttgactttagggactcaatttctccccagggtggatgggggaaatggtgccttcaagaccttcaccaaacatactagaagggcattggccattctattgtggcaaggctgagtagaagatcctaccccaattccttgtaggagtataggccggtctaaagtgagctctatgggcagatctaccccttacttattattccagatctgcagtcacttcgtgggatctgcccctccctgcttcaatacccaaatcctctccagctataacagtagggatgagtacccaaaagctcagccagccccatcaggactcttgtgaaaagagaggatatgttcacacctagcgtcagtattttccctgctaggggttttaggtctcttcccctctcagagctacttgggccatagctcctgctccacagccatcccagccttggcatctagagcttgatgccagtaggctcaactagggagtgagtgcaaaaagctgagtatggtgagagaagcctgtgccctgatccaagtttactcaaccctctcaggtgaccaaaatccccttctcatcactcccctccaaagaggtgactgggccctgcctctgtttgacaaacctctaacccaggtcttgacaccagctgttctgtcccttggagctgtaaaccagagagctgctggggattctggcctagtcccttccacacccccaccccttgctctcaacccaggagcatccacctccttctctgtctcatgtgtgctcttcttctttctacagtattatgtactctactgatatctaaatattgatttctgccttccttgctaatgcaccattagaagatattagtcttggggcaggatgattttggcctcattactttaccacccccacacctggaaagcatatactatattacaaaatgacattttgccaaaattattaatataagaagctttcagtattagtgatgtcatctgtcactataggtcatacaatccattcttaaagtacttgttatttgtttttattattactgtttgtcttctccccagggttcagtcctcaaggggccatcctgtcccaccatgcagtgcccctagcttagagcctccctcaattccccctggccaccaccccccactctgtgcctgaccttgaggagtcttgtgtgcattgctgtgaattagctcacttggtgatatgtcctatattggctaaattgaaacctggaattgtggggcaatctattaatagctgccttaaagtcagtaacttacccttagggaggctgggggaaaaggttagattttgtattcaggggttttttgtgtactttttgggttttttaaaaattgtttttggaggggtttatgctcaatccatgttctatttcagtgccaataaaatttaggaagacttcaaaaaaaaaaaa

SEQ ID NO: 1798 - DNA, 3103 bp, HOMO SAPIENS
gcttacacagtatggccggcgacattagctagcgctcgctctactctctctaacgggaaagcagcggaatacaagagactgaactgtatctgcctctatttccaaaagactcacgttcaactttcgctcacacaaagccgggaaaattttattagtcctttttttaaaaaaagttaatataaaattatagcaaaaaaaaaaaggaacctgaactttagtaacacagctggaacaatccgcagcggcggcggcagcggcgggagaagaggtttaatttagttgattttctgtggttgttggttgttcgctagtctcacggtgatggaagctgcacattttttcgaagggaccgagaagctgctggaggtttggttctcccggcagcagcccgacgcaaaccaaggatctggggatcttcgcactatcccaagatggagcagcatattgtatgggacgtatgaattctgactgttggtacttatatactctggatttcccagagagtcgggtaatcagtcagccagatcaaaccttggaaattctgatgagtgagcttgacccagcagttatggaccagttctacatgaaagatggtgttactgcaaaggatgtcactcgtgagagtggaattcgtgacctgataccaggttctgtcattgatgccacaatgttcaatccttgtgggtattcgatgaatggaatgaaatcggatggaacttattggactattcacatcactccagaaccagaattttcttatgttagctttgaaacaaacttaagtcagacctcctatgatgacctgatcaggaaagttgtagaagtcttcaagccaggaaaatttgtgaccaccttgtttgttaatcagagttctaaatgtcgcacagtgcttgcttcgccccagaagattgaaggttttaagcgtcttgattgccagagtgctatgttcaatgattacaattttgtttttaccagttttgctaagaagcagcaacaacagcagagttgattaagaaaaatgaagaaaaaacgcaaaaagagaacacatgtagaaggtggtggatgctttctagatgtcgatgctgggggcagtgctttccataaccaccactgtgtagttgcagaaagccctagatgtaatgatagtgtaatcattttgaattgtatgcattattatatcaaggagttagatatcttgcatgaatgctctcttctgtgtttaggtattctctgccactcttgctgtgaaattgaagtgcatgtagaaaaaaccttttactatatgaaactttacaacacttgtgaaagcaactcaatttggtttatgcacagtgtaatatttctccaagtatcatccaaaattccccacagacaaggctttcgtcctcattaggtgttggcctcagcctaaccctctaggactgttctattaaattgctgccagaattttacatccagttacctccactttctagaacatattctttactaatgttattgaaaccaatttctacttcatactgatgtttttggaaacagcaattaaagtttttcttccatgagttgagtccttaagaaaatgattccagttactcattttgcatatttgctattttaacattattggaccctgcatttatagtcctttgatttcttccctctccctggtgtctcccccaagaccccaaataaagcaatacactgttaacactgtgggtttatatactaattctataccccagatggggaatgggggagatggtccctgggcttaatattctttaaagggcatgggaatttagcctctcttttattgtaatgtgctcttttggaaaatagttggttagcagggaagacccagagttgtagattgagattagggtgtactggctgaactgtggaaaacatacaattctgtgttcctcagtaaatgagattagcgtctaatgagtagcacccctttactaacttagtagtagtataaaatcatttttatttagttaattaccagagagatttagcataattttgttctggattcagtaaatcaagtcagcttggatcattcaccttaacttttcctttagcagccatttccactagtttccattaagtagtgttctataaactttgatccaaagcagaatcaatgtcttttccatctcgtgacttaaagttctgtgactgtgatgcatgtgagtgttccgacttcatctgttcctcttaactacggtgtttcccttaccatggcattcataggatgaaatgaatgactgcccagaatgagaatttgtccagattattcagataaacatcataaagcagaatacattataaataagtagaatatgaataaatagaataataaaattccaaaatactcaatgggaaatgactagtaatataggctttcaagagttggtaccttttagctatatttgcagattctctgggattttaaggaactgagaaaacagcaaagttgactaaattttatatttcttgtcctctaaatattttgataatttctggattgatgcagtgatgtttttgttccttccgtatttataaatgaaacacctttttttagtgtttctaaacctaaaatctacttggtttgaaatcaagtggttggaacactgtttgacttttatttgaagcatgttgttgattgaaaatttcattgaggaagttttcaatcagtgtgatcagtttgattctgtaatgagcacagcacctaatattttgaggagctctgttttgaggaccaatgcttaaggtggactttgttcgtaaacaatatcccaatagatttgttgacttgaggtctggtttggttttgtttttgttttgttttgttttgttttgtttccaatagaattaagaattctaatgttgaaaaactgcacaaatttttatgggacaaagcctagaaaagagaaatgtagtttgaatcataatctaaatcatcgtatgatagaagagggaaagttttggtgccataatttctcctttcactggtgttggacttaaatcagttgaaatgtatttctgtaccacaatttacgcttcaataaaagtttaattgtctagtgacattcag

SEQ ID NO: 1799 - DNA, 3448 bp, HOMO SAPIENS
acggtttccccgcccctttcaggcctagcaggaaacgaagcggctctttccgctatctgccgcttgtccaccggaagcgagttgcgacacggcaggttcccgcccggaagaagcgaccaaagcgcctgaggaccggcaacatggtgcggtcggggaataaggcagctgttgtgctgtgtatggacgtgggctttaccatgagtaactccattcctggtatagaatccccatttgaacaagcaaagaaggtgataaccatgtttgtacagcgacaggtgtttgctgagaacaaggatgagattgctttagtcctgtttggtacagatggcactgacaatcccctttctggtggggatcagtatcagaacatcacagtgcacagacatctgatgctaccagattttgatttgctggaggacattgaaagcaaaatccaaccaggttctcaacaggctgacttcctggatgcactaatcgtgagcatggatgtgattcaacatgaaacaataggaaagaagtttgagaagaggcatattgaaatattcactgacctcagcagccgattcagcaaaagtcagctggatattataattcatagcttgaagaaatgtgacatctccctgcaattcttcttgcctttctcacttggcaaggaagatggaagtggggacagaggagatggcccctttcgcttaggtggccatgggccttcctttccactaaaaggaattaccgaacagcaaaaagaaggtcttgagatagtgaaaatggtgatgatatctttagaaggtgaagatgggttggatgaaatttattcattcagtgagagtctgagaaaactgtgcgtcttcaagaaaattgagaggcattccattcactggccctgccgactgaccattggctccaatttgtctataaggattgcagcctataaatcgattctacaggagagagttaaaaagacttggacagttgtggatgcaaaaaccctaaaaaaagaagatatacaaaaagaaacagtttattgcttaaatgatgatgatgaaactgaagttttaaaagaggatattattcaagggttccgctatggaagtgatatagttcctttctctaaagtggatgaggaacaaatgaaatataaatcggaggggaagtgcttctctgttttgggattttgtaaatcttctcaggttcagagaagattcttcatgggaaatcaagttctaaaggtctttgcagcaagagatgatgaggcagctgcagttgcactttcctccctgattcatgctttggatgacttagacatggtggccatagttcgatatgcttatgacaaaagagctaatcctcaagtcggcgtggcttttcctcatatcaagcataactatgagtgtttagtgtatgtgcagctgcctttcatggaagacttgcggcaatacatgttttcatccttgaaaaacagtaagaaatatgctcccaccgaggcacagttgaatgctgttgatgctttgattgactccatgagcttggcaaagaaagatgagaagacagacacccttgaagacttgtttccaaccaccaaaatcccaaatcctcgatttcagagattatttcagtgtctgctgcacagagctttacatccccgggagcctctacccccaattcagcagcatatttggaatatgctgaatcctcccgctgaggtgacaacaaaaagtcagattcctctctctaaaataaagaccctttttcctctgattgaagccaagaaaaaggatcaagtgactgctcaggaaattttccaagacaaccatgaagatggacctacagctaaaaaattaaagactgagcaagggggagcccacttcagcgtctccagtctggctgaaggcagtgtcacctctgttggaagtgtgaatcctgctgaaaacttccgtgttctagtgaaacagaagaaggccagctttgaggaagcgagtaaccagctcataaatcacatcgaacagtttttggatactaatgaaacaccgtattttatgaagagcatagactgcatccgagccttccgggaagaagccattaagttttcagaagagcagcgctttaacaacttcctgaaagcccttcaagagaaagtggaaattaaacaattaaatcatttctgggaaattgttgtccaggatggaattactctgatcaccaaagaggaagcctctggaagttctgtcacagctgaggaagccaaaaagtttctggcccccaaagacaaaccaagtggagacacagcagctgtatttgaagaaggtggtgatgtggacgatttattggacatgatataggtcgtggatgtatggggaatctaagagagctgccatcgctgtgatgctgggagttctaacaaaacaagttggatgcggccattcaaggggagccaaaatctcaagaaattcccagcaggttacctggaggcggatcatctaattctctgtggaatgaatacacacatatatattacaagggataatttagaccccatacaagtttataaagagtcattgttattttctggttggtgtattattttttctgtggtcttactgatctttgtatattacatacatgctttgaagtttctggaaagtagatcttttcttgacctagtatatcagtgacagttgcagcccttgtgatgtgattagtgtctcatgtggaaccatggcatggttattgatgagtttcttaaccctttccagagtcctcctttgcctgatcctccaacagctgtcacaacttgtgttgagcaagcagtagcatttgcttcctcccaacaagcagctgggttaggaaaaccatgggtaaggacggactcacttctctttttagttgaggccttctagttaccacattactctgcctctgtatataggtggttttctttaagtggggtgggaaggggagcacaatttcccttcatactccttttaagcagtgagttatggtggtggtctcatgaagaaaagaccttttggcccaatctctgccatatcagtgaacctttagaaactcaaaaactgagaaatttactacagtagttagaattatatcacttcactgttctctacttgcaagcctcaaagagagaaagtttcgttatattaaaacacttaggtaacttttcggtctttcccatttctacctaagtcagctttcatctttgtggatggtgtctcctttactaaataagaaaataacaaagcccttattctctttttttcttgtcctcattcttgccttgagttccagttcctctttggtgtacagacttcttggtacccagtcacctctgtcttcagcaccctcataagtcgtcactaatacacagttttgtacatgtaacattaaaggcataaatgactcatctctctgtgaaaaaaaaaaaaaaaaaaaa

SEQ ID NO: 1800 - DNA, 378 bp, HOMO SAPIENS
aattttgccaagtcgagacccagctctctaccatgatttcctcaactaacaaaaaaggagataaacctctcacctaaaccagtattgcaaagactttttcatggctaaataaacacatacgttttgaggaaagtgagattttaagaatagtcattttatagctaaaatgtacactctggtttgtgctgacatttctggcttgtgtgacatttcaaatcacagagtgttatactagaagaaaactgaggaatccagtagcccaacccactcatttgtcagatgagaaaactgattcccagaaattgtccaacaagttatttgtttatcacatagctgctgctaaaacccaggctgcttggtttctaggcatgtgttttt

SEQ ID NO: 1801 - DNA, 1509 bp, HOMO SAPIENS
aagccgggtaggcgctgtctccgtcgcctccaacccccccggtccgaccagggaaggtgggatgctctgatggccgggcctgcggcgctgagcgcggcggcggcggctgctctggcggccgccctgctcctgctgcgtcgtgaggacccggggccgggggctggccccagcatggccgaaacagaagccctgtcgaagcttcgggaagacttcaggatgcagaataaatccgtctttattttgggcgccagcggagaaaccggcagagtgctcttaaaggaaatcctggagcagggcctgttttccaaagtcacgctcattggccggaggaagctcaccttcgacgaggaagcttataaaaatgtgaatcaagaagtggtggactttgaaaagttggatgactacgcctctgcctttcaaggtcatgatgttggattctgttgcctgggtaccaccagagggaaagctggggcggagggatttgttcgtgttgaccgagattatgtgctgaagtctgcagagctggcaaaagctggagggtgcaaacatttcaacttgctatcctctaaaggagctgataaatcaagcaattttttatatctacaagttaagggagaagtagaagccaaggttgaagaattaaaatttgatcgttactctgtatttaggcctggagttctgttatgtgataggcaagaatctcgcccaggtgaatggctggttagaaagttctttggctccttaccagactcttgggccagtgggcattctgtgcctgtggtgaccgtggttagagcaatgctgaacaatgtggtgagaccaagagacaagcagatggaactgctggagaacaaggccatccatgacctggggaaagcgcatggctctctcaagccatgaccacattggagaaatggtttttattgtcaaccttaacacccatcaccaaatcggtaatttcagggtctaaaaaaagtcagcatgttttaactttgttgttttactatcctcaggcatccattccaatcaagaaatgatggtgctctgcatcagtggttcagagcctggttatacatatagatcactcagggagctttggaaaaataaagatttgtcagccctatctcaaacttgaatcaaaatttctggggtgtgggcacaataatctgtaattttctttgtttatacttcccctgatgccactggttccgatgccactggctggggggcctgctttgaaatgcttgtctgcagagtcacagcagccatgaaaaccttatgaccgtgcaaatgagctctgctctaaaattgttgacattcatgtctctgagttacaaaagtgctaattcactacatgtaattgtgtaagtaaacattgtgcctttactacttctttatgtaatagaagttatatacctaagcttatataatacatggggaggattaaataaaggaataaagatgaatggacaactcctaaaaaaaaaaaaaaaaaaaaaaaaaaaaaaa

SEQ ID NO: 1802 - DNA, 2509 bp, HOMO SAPIENS
gggaacgcactcgaccgggaagcccgagggagaggcgggaggcagcggcgcggccgagctcgtgggagacgctatcgcaagatggcgtctgcgaggccgcgggatgcggagtgagcgcgccccgccgggggctgtgcgaggctgctgctgctctccccgtcgccgccgccgccgccgccagtgcggcgccgcctctccgccagccactgcgccgcggccaagcctcctgcctcgcagcggtcccccgcgtcccggcctgcagcctccccgggcgccggcgcccccagcacgccccatcgggcaccccactctctccgaggtgtgggtgcggcgggctgatgaggtgatccctagcccgcctgggaggagcgcctggactcgcgggcggcggcgagcgcctttacaatggccctgaccctgtttgatacagatgaatatagacctcctgtttggaaatcttacttatatcagctacaacaggaagcccctcatcctcgaagaattacctgtacttgcgaggtggaaaacagaccaaagtattatggaagagagtttcatggcatgatctccagagaagcagccgaccagctcttgattgtggctgaggggagctacctcatccgggagagccagcggcagccagggacctacactttggctttaagatttggaagtcaaaccagaaacttcaggctctactacgatggcaagcactttgttggggagaaacgctttgagtccatccacgatctggtgactgatggcttgattactctctatattgaaaccaaggcagcagaatacattgccaagatgacgataaacccaatttatgagcacgtaggatacacaaccttaaacagagagccagcatacaaaaaacatatgccagtcctgaaagagacacatgatgagagagattctacaggccaggatggggtgtcagagaaaagggtgcatacattcagagggccacactggtgtgaatactgtgccaactttatgtggggtctcattgctcagggagtgaaatgtgcagattgtggtttgaatgttcataagcagtgttccaagatggtcccaaatgactgtaagccagacttgaagcatgtcaaaaaggtgtacagctgtgaccttacgacgctcgtgaaagcacataccactaagcggccaatggtggtagacatgtgcatcagggagattgagtctagaggtcttaattctgaaggactataccgagtatcaggatttagtgacctaattgaagatgtcaagatggctttcgacagagatggtgagaaggcagatatttctgtgaacatgtatgaagatatcaacattatcactggtgcacttaaactgtacttcagggatttgccaattccactcattacatatgatgcctaccctaagtttatagaatctgccaaaattatggatccggatgagcaattggaaacccttcatgaagcactgaaactactgccacctgctcactgcgaaaccctccggtacctcatggcacatctaaagagagtgaccctccacgaaaaggagaatcttatgaatgcagagaaccttggaatcgtctttggacccacccttatgagatctccagaactagacgccatggctgcattgaatgatatacggtatcagagactggtggtggagctgcttatcaaaaacgaagacattttattttaaatttttaatttgaggggaaaagaaatgttttacagatgaaggaatgttttatagtaatttaatttgctcctgtagctgcattatttcttgattagaggtttgggcatataaccagattaaagtgaaggaactttctgttgtttttgtagcaccgctcagctgtcttgtaaaacagtgaacacacgctttctggttctagtaatcctgggtgtttatcacgttcagagaaactcaagctattgcatgattagccccctatctggcaaggaaaccccatacagaagaaacaacaaacctgcgcctgcaccgcctctgcgtcctgggtagtctgtgcttgtaatccagcatgtttcacagagtaagcctgttgtgactttgcttttggggtctatgtcattggtttctgatgcttgtacaaacacgcacacacaaatggataaaacagcacctctggctgttacattaccataaaccatatcacatgcctacattttacaaatgatttctggtttctcttagttcttctctaacatagtactttctttccagcaaaagcaaaatgtgttttcagatttgttactttaataaaggttatccataccaataaaaagtgtacaacacagcattttctgttaaattattattggttttcagttgtaatttggtattttttctggcatgcgtttattaatttattaaattggcttttagaaataaaaaatattgatagcttacttttttctcataagaatattcgggaaaatgtgtttggccatttattaaatactgagtacttcttctg

SEQ ID NO: 1803 - DNA, 295 bp, HOMO SAPIENS
aatttggtttcatataactggagtagtaattaatattttaacttcatcaactagatgtatctcctcagtagcatagtaactggtacatccagaaatctgaaatccgagttacttgatacaaattctactttatctaaccattagttattaaggaggtaaaatcttgttctaatttgctattaaaatcttattggttaaatagaaataagaaaaagtataattaagtttcttcatcctcaatgtcaactttatattgtaattaaatgtgtagcaaccaagctgacaatagtgatta

SEQ ID NO: 1804 - DNA, 3096 bp, HOMO SAPIENS
cgggcgcccagagggcaaatgaggggcggcggggtggcgggtcggggggagacgcggaatttcccagcgcgggggctctggcttaccctgcaaccgggcagtctctttctgtttacggagagaaaggggaaatggaaaagtcggggaggcggtggctggcgtccgctgcgccgcccctgggcaggctcagacgccgtgagtcaggggcagagcagggcggtctgagcgtgcgggcgacgcgggtctcactcgtccgctccgctctggactgcgcgccacgctctggggtccggcgccctggttcctgcttctgccgctgccgccgccggatcccagtggcccggcgtgctcggctcccacaggcctgcagccagcatcgcaccgaaccttcggggggccgcggctggagcgctcggccggcgtgggagcgccaaggccgcagatgcaatcttcttaccgcgaagaagccaggggaataggtagccacatcttgtttgcagataagaaaggaagctaacgcagtatctgcaaagccaggagtctgactcagtacttttctcactcatgcatacaaagcagctaaaaatgacacagcttatttaccatgcccctgacactgcactgagcactttatgagcttgaactctgttaatcctcacgaccacctcatgagactctccagaaagagcaacagtaatggagtacatgagcactggaagtgacaataaagaagagattgatttattaattaaacatttaaatgtgtctgatgtaatagacattatggaaaatctttatgcaagtgaagagccagcagtttatgaacccagtctaatgaccatgtgtcaagacagtaatcaaaacgatgagcgttctaagtctctgctgcttagtggccaagaggtaccatggttgtcatcagtcagatatggaactgtggaggatttgcttgcttttgcaaaccatatatccaacactgcaaagcatttttatggacaacgaccacaggaatctggaattttattaaacatggtcatcactccccaaaatggacgttaccaaatagattccgatgttctcctgatcccctggaagctgacttacaggaatattggttctgattttattcctcggggcgcctttggaaaggtatacttggcacaagatataaagacgaagaaaagaatggcgtgtaaactgatcccagtagatcaatttaagccatctgatgtggaaatccaggcttgcttccggcacgagaacatcgcagagctgtatggcgcagtcctgtggggtgaaactgtccatctctttatggaagcaggcgagggagggtctgttctggagaaactggagagctgtggaccaatgagagaatttgaaattatttgggtgacaaagcatgttctcaagggacttgattttctacactcaaagaaagtgatccatcatgatattaaacctagcaacattgttttcatgtccacaaaagctgttttggtggattttggcctaagtgttcaaatgaccgaagatgtctattttcctaaggacctccgaggaacagagatttacatgagcccagaggtcatcctgtgcaggggccattcaaccaaagcagacatctacagcctgggggccacgctcatccacatgcagacgggcaccccaccctgggtgaagcgctaccctcgctcagcctatccctcctacctgtacataatccacaagcaagcacctccactggaagacattgcagatgactgcagtccagggatgagagagctgatagaagcttccctggagagaaaccccaatcaccgcccaagagccgcagacctactaaaacatgaggccctgaacccgcccagagaggatcagccacgctgtcagagtctggactctgccctcttggagcgcaagaggctgctgagtaggaaggagctggaacttcctgagaacattgctgattcttcgtgcacaggaagcaccgaggaatctgagatgctcaagaggcaacgctctctctacatcgacctcggcgctctggctggctacttcaatcttgttcggggaccaccaacgcttgaatatggctgaaggatgccatgtttgctctaaattaagacagcattgatctcctggaggctggttctgctgcctctacacaggggccctgtacagtgaatggtgccattttcgaaggagcagtgtgacctcctgtgacccatgaatgtgcctccaagcggccctgtgtgtttgacatgtgaagctatttgatatgcaccaggtctcaaggttctcatttctcaggtgacgtgattctaaggcaggaatttgagagttcacagaaggatcgtgtctgctgactgtttcattcactgtgcactttgctcaaaattttaaaaataccaatcacaaggataatagagtagcctaaaattactattcttggttcttatttaagtatggaatattcattttactcagaatagctgttttgtgtatattggtgtatattatataactctttgagcctttattggtaaattctggtatacattgaattcattataatttgggtgactagaacaacttgaagattgtagcaataagctggactagtgtcctaaaaatggctaactgatgaattagaagccatctgacagcaggccactagtgacagtttcttttgtgttcctatggaaacattttatactgtacatgctatgctgaagacattcaaaacgtgatgttttgaatgtggataaaactgtgtaaaccacataatttttgtacatcccaaaggatgagaatgtgacctttaagaaaaatgaaaacttttgtaaattattgatgattttgtaattcttatgactaaattttcttttaagcatttgtatattaaaatagcatactgtgtatgttttatatcaaatgccttcatgaatctttcatacatatatatatttgtaacattgtaaagtatgtgagtagtcttatgtaaagtatgtttttacattatgcaaataaaacccaatacttttgtccaatgtggttggtcaaatcaactgaataaattcagtattttgcctt

SEQ ID NO: 1805 - DNA, 323 bp, HOMO SAPIENS
  misc_feature (245)..(245): n is a, c, g, or t
tcatcataggagtgtggaagctgctggtacaaaatgagtcaggggaggccgtgaagaagctctcgaagacctgcctgtagcagaactcaccccagaaccctcgggactgcgacgagggcgcccgcccagtgacggccactcctgcggtgaacagtactgcctcctgccaggagctgctgtgacctgtgaacttcgttctagagcagcttacatggacttctttgccttttaaagtgttgcctttntcgcgaacaccccccaaaatgccttccagtgtagcacgcatatcctgactgcaatccccttgctgttcctgaataaac

SEQ ID NO: 1806 - DNA, 4360 bp, HOMO SAPIENS
agggggccagacatttaaggaacagatgacactggtagcctcactgttggggcaaaggaagaaggagacgggccaccctacagtccaggcactagctgagcctccaaagccgtggacacagcattcgagtgttgggagggactggtcagtgctgaagtctcacaggtgagtgcccacgcctgctgtcaccatgacaaccattcacagccggcagatgctgcaggagcacgtgtccatggagttctccagctccaccacccacgtgcagaccttctcccagacaaccaagatcgtgggagaggaggtcgtgaggaggaagtcctcgagcatagtggagttcttcagcttagtgacccggagctcaaacatccctgcgggcgacagcgtccctgagttcgtggagaagcctcaaccggtcaccgcgcccgagggggacaaagccgtgttccgagcccgggtgcaggggaacgccaaaccccacatctcctggaagagggagagcggcatccccatcaaggagtccgccaagatattctacgacagcattaacaaggaacacgtgctgaagctggagccactgacttcggatgactctgacaactataagtgcattgcaagcaatgaccatgcagatgccatctataccgtatctctgctggtaacagaaggtcaagagaaaatggacttcaaaaagatgctgaagaagagggcaccccctgctcccaagaagaagcagaagaaggtggcaaatgagaaagagatgctggagattttgtccaaagtgcccaagaaagactttgagaaggtgtgcatggagtatggtttcaccgactttcgggggctgctcaggaagctcaaagagatgaagaagaaagtagaggtggaggccatccggattctgaagcccctggaagacaaagagaccaaggttgacaccacagtggtctttgactgcataatggaactgaaagaccccaatgtcaagatgatatggatcaagggtactgagccactgaggatccagtactccctgggcaagtacgatgtgaagcagatgggcaccaagtacatgctggttattagcaacgtgaacatgaacgatgctggcatctacagcctgtccgtgggcgataagcggatgagtgcagagctcacagtgctggatgagccactgaagttcctgggagagatgaagcctgtgaaggtgacagagcgccagacagctgtgtttgagatccgcctctccaagaaagagcccaactttgtgtggaagttcaatgggaaggagctgaagagggatgacaagtatgaaatcacggtgtccgaagatggtctgacgcacacgcttaagattaaggatgccagactcagtgacagcggcgagttctctgctgaggcggggaacctggtacaaaaggcccagctcactattgaccgcatccccatcaagtttgtgagcaacctcaaaaatgtacgtgtgaaagagaggagtcgcgcatgcctggagtgtgagctgacatccaaggatgtgacactgcgctggaagaaggatgggcagctgctgatgcatggcactaagtacagcatgaaccatgagggcaagcgagcagagctgatcattgaggatgcacagctcagtgatggtggcgagtacactgtggtggccatgcaggatggagaccctactgaatactacagtactgccatcgtcactgtggaggagcgtctggccacagtgaagagcgggatgtccgacgtgcacgcggccactgggagcccagctgagttgtgtgtagtgctgaatgacgagaaggtggagggtgtgtggctgaaggatggcaaggagatcacggacttgccaggcatgcagattgtgaagcagggtgcagtgcacaagctcatctttcccagtatgggccctgagcacgagggcaagtacacattccgggccaagggcacggaaagtgaagcctctgtattcatcgcagatcctcctaccatcgacccgtcagtactggaggcactggctgcgcacgccatcactgtgaaggtaggccacacggcccacatcaaggtccccttccggggaaaaccactgcccaaagtgacatggtacaaggatggcatggaagtgacggaggaggaacgcgtgtccatggagcgcggggaagaccaggcactgctcaccatctccaactgtgtgcgtgaagacagcggcctcatcctgctcaagctcaagaatgaccacggctcagccacggccactctgcaccttagtgtgctggaccgtccaaagcctccacagggccgggtggagttcctggagctctcaggtagttgtgtgcacatgaagtggaaggccccaaaggacaatggtggacgacctgtgacacagttcatagtggaacggagggcagttggcaagaagtcctggattaagataggcgaggtggacggcaaagtcaccaacttctccaccaacaaggtggaagagggaaaagcctaccagttccgtatcctggcagtcaattcagaaggtgtgagtgacccactggagacagaagaagtgtttgcaggaaatcccatagagcctcctggttttgcctcccagcctcaagtgactgatgtgactaaagaagccgtgaccatcacgtggaatgcccctacccaggatgggggagccccagtgctcggctacattgtagaacgaaggaagaaaggcagcaacctgtgggtgccagtcaacaaggaccccatccagggcaccaagtgcactgtggatggtctcctggaggacacagaatatgaattccgagttatagctgtaaataaggcaggccctggacagcccagtgtgccatccagctcagtagtggccaaggatcctgttaaacccccaggcctggtccaggacctgcatgtatctgattcctccaactccagcatttccctggcctggcgggagcctgcagagggagacccaccctctggctacatccttgagatgagggctgaagacacaaaggagtggtccaagtgcacaaagatccccatctcaggcacctgctacacagtgggaggactcatcgagaggcagaaatacttcttccgaatccgggctgtgaatgaggctggggttggggagcctgtggagctagacaagggggtccgtgccatgccaccaccagctgcacccaagtttgacctcagtgcccggctgaagagtcacatggtggttcgcgctgggacagccctctgcatccatgcagccttctctggctcaccaccacctgacgtgatctggcagaaagatggcgttcccaccaagggccgagagacaattaccaagagcaaaaaccactcccagttcctcattaatagcaccaagcgctctgactcaggggtgtaccgaatcttgcttcagaatgagtttggagaagcacgctatgacatccatgtgcgcgtggcagatttccctcggccccccacaaacctacggttgtttgaggaagtccccaacacagtgactctgacctggaaccacagcccagatgtgcaggaggacggtgaggctcactacatcatcatgaagcgggatgcaagcacagccacctggtacacggcagccgagcgtgtcttcagcaacaagtacacagtgacggggctgctcccaggcaggaagtactacttcagagtggtggctcggaatgaaatcggtgacagtgagccacttgactccagggacacctggctcatcaataaggaccagatccaggacctgagcgccaagctcaagccctacgagaagaaggactggcgccacgcgccgcgcttcgtgacgcccctcaagccacacacggtgctccgcggccaggactgcaccatgacctgcgccttccttgggaacccgcggcccacagtgaccctctacaagggcgacgtcaacatcacggccaactccaagttctggtacaactccaccagcggcgtgtgcaccctcgtcatccccacctgcacgctcaaggacagcggcgattacagcgtgctggtggagaacgagctgggcaaggaccgcagcagctgcacgctcaccgtctatgacaaagatgataagtcagttgtagcatccatcaccgagagtctgcagaagaaatcaaagcacctcatgtgagctccagccaagcccaggcatcaggaggctgttatgatgtggagtttcttggcctgtcctctgcatggcccagtgtaggaagcccagtttgctctctggtgtttgttaatgtaaacattcagtgaagggatggggcaataaacgtaactcatcctttcccgttaaaaaaaaaaaaaaaaaaaaaaaaaa

SEQ ID NO: 1807 - DNA, 8708 bp, HOMO SAPIENS
gtaaaggactggggccccgcaactggcctctcctgccctcttaagcgcagcgccattttagcaacgcagaagcccggcgccgggaagcctcagctcgcctgaaggcaggtcccctctgacgcctccgggagcccaggtttcccagagtccttgggacgcagcgacgagttgtgctgctatcttagctgtccttataggctggccattccaggtggtggtatttagataaaaccactcaaactctgcagtttggtcttggggtttggaggaaagcttttatttttcttcctgctccggttcagaaggtctgaagctcatacctaaccaggcataacacagaatctgcaaaacaaaaacccctaaaaaagcagacccagagcagtgtaaacacttctgggtgtgtccctgactggctgcccaaggtctctgtgtcttcggagacaaagccattcgcttagttggtctactttaaaaggccacttgaactcgctttccatggcgatttgccttgtgagcactttcaggagagcctggaagctgaaaaacggtagaaaaatttccgtgcgggccgtggggggctggcggcaactggggggccgcagatcagagtgggccactggcagccaacggcccccggggctcaggcggggagcagctctgtggtgtgggattgaggcgttttccaagagtgggttttcacgtttctaagatttcccaagcagacagcccgtgctgctccgatttctcgaacaaaaaagcaaaacgtgtggctgtcttgggagcaagtcgcaggactgcaagcagttgggggagaaagtccgccattttgccacttctcaaccgtccctgcaaggctggggctcagttgcgtaatggaaagtaaagccctgaactatcacactttaatcttccttcaaaaggtggtaaactatacctactgtccctcaagagaacacaagaagtgctttaagaggtattttaaaagttccgggggttttgtgaggtgtttgatgacccgtttaaaatatgatttccatgtttcttttgtctaaagtttgcagctcaaatctttccacacgctagtaatttaagtatttctgcatgtgtagtttgcattcaagttccataagctgttaagaaaaatctagaaaagtaaaactagaacctatttttaaccgaagaactactttttgcctccctcacaaaggcggcggaaggtgatcgaattccggtgatgcgagttgttctccgtctataaatacgcctcgcccgagctgtgcggtaggcattgaggcagccagcgcaggggcttctgctgagggggcaggcggagcttgaggaaaccgcagataagtttttttctctttgaaagatagagattaatacaactacttaaaaaatatagtcaataggttactaagatattgcttagcgttaagtttttaacgtaattttaatagcttaagattttaagagaaaatatgaagacttagaagagtagcatgaggaaggaaaagataaaaggtttctaaaacatgacggaggttgagatgaagcttcttcatggagtaaaaaatgtatttaaaagaaaattgagagaaaggactacagagccccgaattaataccaatagaagggcaatgcttttagattaaaatgaaggtgacttaaacagcttaaagtttagtttaaaagttgtaggtgattaaaataatttgaaggcgatcttttaaaaagagattaaaccgaaggtgattaaaagaccttgaaatccatgacgcagggagaattgcgtcatttaaagcctagttaacgcatttactaaacgcagacgaaaatggaaagattaattgggagtggtaggatgaaacaatttggagaagatagaagtttgaagtggaaaactggaagacagaagtacgggaaggcgaagaaaagaatagagaagatagggaaattagaagataaaaacatacttttagaagaaaaaagataaatttaaacctgaaaagtaggaagcagaagaaaaaagacaagctaggaaacaaaaagctaagggcaaaatgtacaaacttagaagaaaattggaagatagaaacaagatagaaaatgaaaatattgtcaagagtttcagatagaaaatgaaaaacaagctaagacaagtattggagaagtatagaagatagaaaaatataaagccaaaaattggataaaatagcactgaaaaaatgaggaaattattggtaaccaatttattttaaaagcccatcaatttaatttctggtggtgcagaagttagaaggtaaagcttgagaagatgagggtgtttacgtagaccagaaccaatttagaagaatacttgaagctagaaggggaagttggttaaaaatcacatcaaaaagctactaaaaggactggtgtaatttaaaaaaaactaaggcagaaggcttttggaagagttagaagaatttggaaggccttaaatatagtagcttagtttgaaaaatgtgaaggactttcgtaacggaagtaattcaagatcaagagtaattaccaacttaatgtttttgcattggactttgagttaagattattttttaaatcctgaggactagcattaattgacagctgacccaggtgctacacagaagtggattcagtgaatctaggaagacagcagcagacaggattccaggaaccagtgtttgatgaagctaggactgaggagcaagcgagcaagcagcagttcgtggtgaagataggaaaagagtccaggagccagtgcgatttggtgaaggaagctaggaagaaggaaggagcgctaacgatttggtggtgaagctaggaaaaaggattccaggaaggagcgagtgcaatttggtgatgaaggtagcaggcggcttggcttggcaaccacacggaggaggcgagcaggcgttgtgcgtagaggatcctagaccagcatgccagtgtgccaaggccacagggaaagcgagtggttggtaaaaatccgtgaggtcggcaatatgttgtttttctggaacttacttatggtaaccttttatttattttctaatataatgggggagtttcgtactgaggtgtaaagggatttatatggggacgtaggccgatttccgggtgttgtaggtttctctttttcaggcttatactcatgaatcttgtctgaagcttttgagggcagactgccaagtcctggagaaatagtagatggcaagtttgtgggttttttttttttacacgaatttgaggaaaaccaaatgaatttgatagccaaattgagacaatttcagcaaatctgtaagcagtttgtatgtttagttggggtaatgaagtatttcagttttgtgaatagatgacctgtttttacttcctcaccctgaattcgttttgtaaatgtagagtttggatgtgtaactgaggcgggggggagttttcagtatttttttttgtgggggtgggggcaaaatatgttttcagttctttttcccttaggtctgtctagaatcctaaaggcaaatgactcaaggtgtaacagaaaacaagaaaatccaatatcaggataatcagaccaccacaggtttacagtttatagaaactagagcagttctcacgttgaggtctgtggaagagatgtccattggagaaatggctggtagttactcttttttccccccacccccttaatcagactttaaaagtgcttaaccccttaaacttgttattttttacttgaagcattttgggatggtcttaacagggaagagagagggtgggggagaaaatgtttttttctaagattttccacagatgctatagtactattgacaaactgggttagagaaggagtgtaccgctgtgctgttggcacgaacaccttcagggactggagctgcttttatccttggaagagtattcccagttgaagctgaaaagtacagcacagtgcagctttggttcatattcagtcatctcaggagaacttcagaagagcttgagtaggccaaatgttgaagttaagttttccaataatgtgacttcttaaaagttttattaaaggggaggggcaaatattggcaattagttggcagtggcctgttacggttgggattggtggggtgggtttaggtaattgtttagtttatgattgcagataaactcatgccagagaacttaaagtcttagaatggaaaaagtaaagaaatatcaacttccaagttggcaagtaactcccaatgatttagtttttttccccccagtttgaattgggaagctgggggaagttaaatatgagccactgggtgtaccagtgcattaatttgggcaaggaaagtgtcataatttgatactgtatctgttttccttcaaagtatagagcttttggggaaggaaagtattgaactgggggttggtctggcctactgggctgacattaactacaattatgggaaatgcaaaagttgtttggatatggtagtgtgtggttctcttttggaatttttttcaggtgatttaataataatttaaaactactatagaaactgcagagcaaaggaagtggcttaatgatcctgaagggatttcttctgatggtagcttttgtattatcaagtaagattctattttcagttgtgtgtaagcaagtttttttttagtgtaggagaaatacttttccattgtttaactgcaaaacaagatgttaaggtatgcttcaaaaattttgtaaattgtttattttaaacttatctgtttgtaaattgtaactgattaagaattgtgatagttcagcttgaatgtctcttagagggtgggcttttgttgatgagggaggggaaactttttttttttctatagacttttttcagataacatcttctgagtcataaccagcctggcagtatgatggcctagatgcagagaaaacagctccttggtgaattgataagtaaaggcagaaaagattatatgtcatacctccattggggaataagcataaccctgagattcttactactgatgagaacattatctgcatatgccaaaaaattttaagcaaatgaaagctaccaatttaaagttacggaatctaccattttaaagttaattgcttgtcaagctataaccacaaaaataatgaattgatgagaaatacaatgaagaggcaatgtccatctcaaaatactgcttttacaaaagcagaataaaagcgaaaagaaatgaaaatgttacactacattaatcctggaataaaagaagccgaaataaatgagagatgagttgggatcaagtggattgaggaggctgtgctgtgtgccaatgtttcgtttgcctcagacaggtatctcttcgttatcagaagagttgcttcatttcatctgggagcagaaaacagcaggcagctgttaacagataagtttaacttgcatctgcagtattgcatgttagggataagtgcttatttttaagagctgtggagttcttaaatatcaaccatggcactttctcctgaccccttccctaggggatttcaggattgagaaatttttccatcgagcctttttaaaattgtaggacttgttcctgtgggcttcagtgatgggatagtacacttcactcagaggcatttgcatctttaaataatttcttaaaagcctctaaagtgatcagtgccttgatgccaactaaggaaatttgtttagcattgaatctctgaaggctctatgaaaggaatagcatgatgtgctgttagaatcagatgttactgctaaaatttacatgttgtgatgtaaattgtgtagaaaaccattaaatcattcaaaataataaactatttttattagagaatgtatacttttagaaagctgtctccttatttaaataaaatagtgtttgtctgtagttcagtgttggggcaatcttgggggggattcttctctaatctttcagaaactttgtctgcgaacactctttaatggaccagatcaggatttgagcggaagaacgaatgtaactttaaggcaggaaagacaaattttattcttcataaagtgatgagcatataataattccaggcacatggcaatagaggccctctaaataaggaataaataacctcttagacaggtgggagattatgatcagagtaaaaggtaattacacattttatttccagaaagtcaggggtctataaattgacagtgattagagtaatactttttcacatttccaaagtttgcatgttaactttaaatgcttacaatcttagagtggtaggcaatgttttacactattgaccttatatagggaagggagggggtgcctgtggggttttaaagaattttcctttgcagaggcatttcatccttcatgaagccattcaggattttgaattgcatatgagtgcttggctcttccttctgttctagtgagtgtatgagaccttgcagtgagtttatcagcatactcaaaatttttttcctggaatttggagggatgggaggagggggtggggcttacttgttgtagctttttttttttttacagacttcacagagaatgcagttgtcttgacttcaggtctgtctgttctgttggcaagtaaatgcagtactgttctgatcccgctgctattagaatgcattgtgaaacgactggagtatgattaaaagttgtgttccccaatgcttggagtagtgattgttgaaggaaaaaatccagctgagtgataaaggctgagtgttgaggaaatttctgcagttttaagcagtcgtatttgtgattgaagctgagtacattttgctggtgtatttttaggtaaaatgctttttgttcatttctggtggtgggaggggactgaagcctttagtcttttccagatgcaaccttaaaatcagtgacaagaaacattccaaacaagcaacagtcttcaagaaattaaactggcaagtggaaatgtttaaacagttcagtgatctttagtgcattgtttatgtgtgggtttctctctcccctcccttggtcttaattcttacatgcaggaacactcagcagacacacgtatgcgaagggccagagaagccagacccagtaagaaaaaatagcctatttactttaaataaaccaaacattccattttaaatgtggggattgggaaccactagttctttcagatggtattcttcagactatagaaggagcttccagttgaattcaccagtggacaaaatgaggaaaacaggtgaacaagctttttctgtatttacatacaaagtcagatcagttatgggacaatagtattgaatagatttcagctttatgctggagtaactggcatgtgagcaaactgtgttggcgtgggggtggaggggtgaggtgggcgctaagcctttttttaagatttttcaggtacccctcactaaaggcaccgaaggcttaaagtaggacaaccatggagccttcctgtggcaggagagacaacaaagcgctattatcctaaggtcaagagaagtgtcagcctcacctgatttttattagtaatgaggacttgcctcaactccctctttctggagtgaagcatccgaaggaatgcttgaagtacccctgggcttctcttaacatttaagcaagctgtttttatagcagctcttaataataaagcccaaatctcaagcggtgcttgaaggggagggaaagggggaaagcgggcaaccacttttccctagcttttccagaagcctgttaaaagcaaggtctccccacaagcaacttctctgccacatcgccaccccgtgccttttgatctagcacagacccttcacccctcacctcgatgcagccagtagcttggatccttgtgggcatgatccataatcggtttcaaggtaacgatggtgtcgaggtctttggtgggttgaactatgttagaaaaggccattaatttgcctgcaaattgttaacagaagggtattaaaaccacagctaagtagctctattataatacttatccagtgactaaaaccaacttaaaccagtaagtggagaaataacatgttcaagaactgtaatgctgggtgggaacatgtaacttgtagactggagaagataggcatttgagtggctgagagggcttttgggtgggaatgcaaaaattctctgctaagactttttcaggtgaacataacagacttggccaagctagcatcttagcggaagctgatctccaatgctcttcagtagggtcatgaaggtttttcttttcctgagaaaacaacacgtattgttttctcaggttttgctttttggcctttttctagcttaaaaaaaaaaaaagcaaaagatgctggtggttggcactcctggtttccaggacggggttcaaatccctgcggcgtctttgctttgactactaatctgtcttcaggactctttctgtatttctccttttctctgcaggtgctagttcttggagttttggggaggtgggaggtaacagcacaatatctttgaactatatacatccttgatgtataatttgtcaggagcttgacttgattgtatattcatatttacacgagaacctaatataactgccttgtctttttcaggtaatagcctgcagctggtgttttgagaagccctactgctgaaaacttaacaattttgtgtaataaaaatggagaagctctaaa

SEQ ID NO: 1808 - DNA, 3890 bp, HOMO SAPIENS
gcacctgggcacctgggcagccgccgcggcgctggctagacgtgcgcgatggagggcgacggcgggaccccatgggccctggcgctgctgcgcaccttcgacgcgggcgagttcacgggctgggagaaggtgggctcgggcggcttcgggcaggtgtacaaggtgcgccatgtccactggaagacctggctggccatcaagtgctcgcccagcctgcacgtcgacgacagggagcgcatggagcttttggaagaagccaagaagatggagatggccaagtttcgctacatcctgcctgtgtatggcatctgccgcgaacctgtcggcctggtcatggagtacatggagacgggctccctggaaaagctgctggcttcggagccattgccatgggatctccggttccgaatcatccacgagacggcggtgggcatgaacttcctgcactgcatggccccgccactcctgcacctggacctcaagcccgcgaacatcctgctggatgcccactaccacgtcaagatttctgattttggtctggccaagtgcaacgggctgtcccactcgcatgacctcagcatggatggcctgtttggcacaatcgcctacctccctccagagcgcatcagggagaagagccggctcttcgacaccaagcacgatgtatacagctttgcgatcgtcatctggggcgtgctcacacagaagaagccgtttgcagatgagaagaacatcctgcacatcatggtgaaggtggtgaagggccaccgccccgagctgccgcccgtgtgcagagcccggccgcgcgcctgcagccacctgatacgcctcatgcagcggtgctggcagggggatccgcgagttaggcccaccttccaagaaattacttctgaaaccgaggacctgtgtgaaaagcctgatgacgaagtgaaagaaactgctcatgatctggacgtgaaaagccccccggagcccaggagcgaggtggtgcctgcgaggctcaagcgggcctctgcccccaccttcgataacgactacagcctctccgagctgctctcacagctggactctggagtttcccaggctgtcgagggccccgaggagctcagccgcagctcctctgagtccaagctgccatcgtccggcagtgggaagaggctctcgggggtgtcctcggtggactccgccttctcttccagaggatcactgtcgctgtcctttgagcgggaaccttcaaccagcgatctgggcaccacagacgtccagaagaagaagcttgtggatgccatcgtgtccggggacaccagcaaactgatgaagatcctgcagccgcaggacgtggacctggcactggacagcggtgccagcctgctgcacctggcggtggaggccgggcaagaggagtgcgccaagtggctgctgctcaacaatgccaaccccaacctgagcaaccgtaggggctccaccccgttgcacatggccgtggagaggagggtgcggggtgtcgtggagctcctgctggcgcggaagatcagtgtcaacgccaaggatgaggaccagtggacagccctccactttgcagcccagaacggggacgagtctagcacacggctgctgttggagaagaacgcctcggtcaacgaggtggactttgagggccggacgcccatgcacgtggcctgccagcacgggcaggagaatatcgtgcgcatcctgctgcgccgaggcgtggacgtgagcctgcagggcaaggatgcctggctgccactgcactacgctgcctggcagggccacctgcccatcgtcaagctgctggccaagcagccgggggtgagtgtgaacgcccagacgctggatgggaggacgccattgcacctggccgcacagcgcgggcactaccgcgtggcccgcatcctcatcgacctgtgctccgacgtcaacgtctgcagcctgctggcacagacacccctgcacgtggccgcggagacggggcacacgagcactgccaggctgctcctgcatcggggcgctggcaaggaggccatgacctcagacggctacaccgctctgcacctggctgcccgcaacggacacctggccactgtcaagctgcttgtcgaggagaaggccgatgtgctggcccggggacccctgaaccagacggcgctgcacctggctgccgcccacgggcactcggaggtggtggaggagttggtcagcgccgatgtcattgacctgttcgacgagcaggggctcagcgcgctgcacctggccgcccagggccggcacgcacagacggtggagactctgctcaggcatggggcccacatcaacctgcagagcctcaagttccagggcggccatggccccgccgccacgctcctgcggcgaagcaagacctagctggctgcctgcggagaccgggggtccacgtggggctcttgtcctgtcctgtgttcctcgtggggatggaacgatcctgcgtggggccctgttgtggcttacctaaatgttaaccaagcagaggtgacatggtgccatcaggaggcggctgctgctgaccggagtgtcccctccaggtgaagctggctcaggtgcacatgcccgctccatcatcgatctaggcacctgctgtctgaagggaccgtgggtcagaatcatttcgttgtgctcctaatgggtcgctgaggctggtctctcagtgatgaagccccaggcgtggaagcatccactctctcctgaggcgagccaccttgggttgctggagctcaccagtcttgagggaggtgcaggggaaactgtgttttttatcttcatacatgacggtgggcagagaggcctgtcttaaagtttccatggaattgttttataaaatatcttaagagatgaataccttatcagctgttgcttgaaacctgttaaaaatgttcataacattggatagtctagtctctaaatgatgactaagtagtggggttggctttgaaaacaatgttttatgcaacaaggaacgaatggtagcagccagctttgcggggcgtatgtgtggccagctcttaaccattccagtctattacttgggtgagtccttgtggacaaccacacacacgtgcccacatggtactagctgccgttcgtttctcgttgcctaagatgttttggcaactctagagccacaggcctaagtcattaaaaaattctccctttgtaacctcagtgctggggactgaggcgagccccctcaggtcgctggagtgcaccagtcttggggaagaggtgcaggagaagctgtgttttttatctccacacgcagtatgaagataaaattacatagtattacctagacatagacagtattacctaggtagatgcactgctcacctgcgcccttcccagctctcatttttgttaggtgatttgggatagggatagtgttttggggtatggggggagtgtttctgacctgctttgcagacgtgcctccgcacctcagcagtttggggtgtggccccagggcggttcttggatgtaaaagatgtggccatctagcctcgtaacttcactgtcacctgtgtcccatagggtgccttctgaatactgttattagaataagtttgttgcagaacgtgaccctgcgtgcaaacatgtaccgtggcctggtatatgatagagattgatattaatgtaccatgtatgttaatgtgaatctgtgggcaggatacttttccatggcaggaaatatccaagctgttgaaactggctatgttttaatatgcctcattgtgcctttactgttgtgtggactgcgtgagggacaagaagttccatttgatgtcaataaagcaaagtacttgcctacttttttgaagctgaaaaaaaaaaaaaaaaaa

SEQ ID NO: 1809 - DNA, 2320 bp, HOMO SAPIENS
tacagctcccagcatgccccggggcccgcaaccgtccgccgcccggtgcactgtggacgatgagtcagggttaggggcgccaggacgtgggcgtgcaggacgccagagctgggtcagagctcgagccagcggcgcccggagagattcggagatgcaggcggctcggatggccgcgagcttggggcggcagctgctgaggctcgggggcggaagctcgcggctcacggcgctcctggggcagccccggcccggccctgcccggcggccctatgccgggggtgccgctcagctggctctggacaagtcagattcccacccctctgacgctctgaccaggaaaaaaccggccaaggcggaatctaagtcctttgctgtgggaatgttcaaaggccagctcaccacagatcaggtgttcccatacccgtccgtgctcaacgaagagcagacacagtttcttaaagagctggtggagcctgtgtcccgtttcttcgaggaagtgaacgatcccgccaagaatgacgctctggagatggtggaggagaccacttggcagggcctcaaggagctgggggcctttggtctgcaagtgcccagtgagctgggtggtgtgggcctttgcaacacccagtacgcccgtttggtggagatcgtgggcatgcatgaccttggcgtgggcattaccctgggggcccatcagagcatcggtttcaaaggcatcctgctctttggcacaaaggcccagaaagaaaaatacctccccaagctggcatctggggagactgtggccgctttctgtctaaccgagccctcaagcgggtcagatgcagcctccatccgaacctctgctgtgcccagcccctgtggaaaatactataccctcaatggaagcaagctttggatcagtaatgggggcctagcagacatcttcacggtctttgccaagacaccagttacagatccagccacaggagccgtgaaggagaagatcacagcttttgtggtggagaggggcttcgggggcattacccatgggccccctgagaagaagatgggcatcaaggcttcaaacacagcagaggtgttctttgatggagtacgggtgccatcggagaacgtgctgggtgaggttgggagtggcttcaaggttgccatgcacatcctcaacaatggaaggtttggcatggctgcggccctggcaggtaccatgagaggcatcattgctaaggcggtagatcatgccactaatcgtacccagtttggggagaaaattcacaactttgggctgatccaggagaagctggcacggatggttatgctgcagtatgtaactgagtccatggcttacatggtgagtgctaacatggaccagggagccacggacttccagatagaggccgccatcagcaaaatctttggctcggaggcagcctggaaggtgacagatgaatgcatccaaatcatggggggtatgggcttcatgaaggaacctggagtagagcgtgtgctccgagatcttcgcatcttccggatctttgaggggacaaatgacattcttcggctgtttgtggctctgcagggctgtatggacaaaggaaaggagctctctgggcttggcagtgctctaaagaatccctttgggaatgctggcctcctgctaggagaggcaggcaaacagctgaggcggcgggcagggctgggcagcggcctgagtctcagcggacttgtccacccggagttgagtcggagtggcgagctggcagtacgggctctggagcagtttgccactgtggtggaggccaagctgataaaacacaagaaggggattgtcaatgaacagtttctgctgcagcggctggcagacggggccatcgacctctatgccatggtggtggttctctcgagggcctcaagatccctgagtgagggccaccccacggcccagcatgagaaaatgctctgtgacacctggtgtatcgaggctgcagctcggatccgagagggcatggccgccctgcagtctgacccctggcagcaagagctctaccgcaacttcaaaagcatctccaaggccttggtggagcggggtggtgtggtcaccagcaacccacttggcttctgaatactcccggccagggcctgtcccagttatgtgccttccctcaagccaaagccgaagcccctttccttaaggccctggtttgtcccgaaggggcctagtgttcccagcactgtgcctgctctcaagagcacttactgcctcgcaaataataaaaatttctagccagtcaaaaaaaaaaaaaaaaaaaaaaaaaaaaaaaaa

SEQ ID NO: 1810 - DNA, 3830 bp, HOMO SAPIENS
ggtgtttataagaatggaagtgttgtttccttgcccgattccttcatgctatatctcatgaacctctgtaatcttgggggagagactatatttaatgatgacaaacctgtcaccagtgtagcaacaacagtgtgaggacaaaagcaaataaaaattaagaagcgttcaaatttatattcaacaaggaagtcatttcaatcaacaacttctgctgcattatttttccaagatgaaccgatacacaaccatgagacagttgggggacggcacgtatgggagtgtgcttatgggcaagagtaatgaatccggggagctggtggccatcaaaaggatgaagagaaagttctattcttgggatgaatgcatgaacttgagagaagttaagtctctgaagaaacttaatcatgccaatgttattaaattgaaagaagttatcagagaaaatgaccatctttattttatatttgaatatatgaaagaaaacctctatcaattaatgaaagacagaaacaagttgttccctgaatcagtcatcagaaatattatgtatcaaatattgcaagggctggcttttatccataaacatggcttttttcatagggacatgaaaccagaaaacttgctttgtatgggtccagagcttgtgaaaattgctgattttggacttgcaagagaattaaggtcacagccaccatacactgattatgtatctaccagatggtatcgtgcccctgaagttttactgagatcttcagtttatagttctcccattgatgtgtgggctgttggaagtatcatggctgaactctatatgttaaggccacttttcccagggacaagtgaggtcgatgaaatctttaaaatttgccaagttttagggactcccaaaaaaagtgactggccagaaggataccagctggcatcctctatgaacttccgttttccccagtgtgttcctataaacttaaaaactcttattcccaatgccagtaatgaagctattcagctcatgaccgaaatgttgaattgggatccaaagaaacgaccgacagcaagccaggcattgaaacacccatattttcaagttggtcaggtattaggcccttcgtcaaatcatctggaatcaaaacagtctttaaataagcagctgcaaccattagaatcaaagccatctttagttgaggtagagcctaagcctctgccggatataatcgatcaggttgttggacaaccccagccaaaaactagccagcagccactgcagcccattcagccgccacagaacctgagcgtccagcaacctccaaagcaacagagtcaggagaaaccgccacaaacgctattcccgagcatcgtcaaaaacatgccaactaagccaaatggcacactgagtcataaaagtggtaggaggcgttggggtcagactatcttcaagtctggagatagctgggaagagttggaggactatgatttcggagcctcccattccaagaagccaagcatgggtgtttttaaagaaaaaaggaaaaaagattctccatttcggcttccagagccagtaccctcaggctccaaccactcgacaggggaaaacaagagcttacctgctgttacttccctaaaatctgattccgaattgtcaactgctccaacctctaaacagtactacttgaaacaatcaagatatcttccaggtgtgaatcccaagaaggtgtccttgatagccagtggaaaggaaataaacccccacacttggagcaaccagttattccccaagtcactgggacccgttggggcagaacttgctttcaaaaggagcaatgcaggaaatcttggaagttatgctacttacaatcagtcaggatatattccttcctttctcaaaaaagaagtgcagtcagctggccagaggatccacttagcacctctcaatgcaacggcttcagaatatacctggaacacaaaaactggtcgggggcagttttcaggacgtacttataatcctacagcaaaaaacctaaatattgtgaaccgtgcacagcccattccctcagtgcatgggaggacagactgggtggccaagtatggaggccaccggtaggagtctatggtgtgaaaccctacagcattgctccgtagagtacgtgcaagttccttgaccctgggaaatgtctacaaatgtctatttctactgagttctggaagaaatatgcaaaagtgggtacttggaagggcaaaaatcatcccctattttacttatttccaagaaatgcattttcttagcatcattgcccacagtgttgatatatgggtaggatgttacaaagtattgaataaactatttgccaaagtatgaagtatttgatctacaatttaataaatagtaaatccaataagaacccttaaaaaaaaacaacttccagaaaatgtttagagtgttttagttttcatttgttgtatgtgcccaaatggtttagtagttcttcactttgctgtggttggcttaagaggtttgtcttttgtttttgtacagcagttgggccaacctttgctggctgtcagctgtggttcttatttgactaaggctctgcgctgccattttgtcaatgacagaaagattgcaattatttgtttttctactttgaagctatgggagcgatggtaatttcaatcttgagcaggatatctttttttttttttttgaggcgatgtttcactcttgtgtccaggctggagtgcagtggcactatcttggcttactgcaacctccacctcctgggttcaagtgattctcctgcctcagcctcccgagtagctgggattagaggcgtgtgccaccatgcctggctaatttttgtagtattagtagagacagggtttcaccatgttggtcaggctcaggctggtctcaaactcctgacctcaggtgatccacctgcctcggcctcccaaagtgcagggcttacaggtgtgagccacagtgcccagctttttttttttttttttagaaataaatttatctttaacatagagaatatcaaagttatgccacttgattttagtggacggcttgtgttttgatcttgaccagtacagttcccatgaattcaaggtgacaatcaagcccaatggcttgatgacttcaatagtaaccaagtcaaggttctcttggctggacatcattaagaaagttctggaaactgtgtttgtttgatgctggttcattggacttttcaaattgttttgtttctgtgtccctaccagacacaaagatgaagtgtgccagctggttcccccaagccagctcatgctgctgaccactgactcagctctgaccttcacatttgctctgaagcaagtgcgttcagctgctggggcagtgatatcacatagtacatatattatttccttagtttatttccaaactggtattttaaatagacacttcgaactttgggctactctgtttaaatctgccactttctggactggaccttagtactgtaaattctttttaaagaataataatgttaccaactgctgagatttttatgtattttgtgactttgtaacaactgctattgtaataagtgtcatcttgtgggcattatacaaaggcatattataaaataataatgatatttttgtatagaagagtcaactgttcagatgtaagatgttgaaaaatgttaaaatctaaagagtaatttatcctagtggtaatggttatatgtatttgtacagtttaaattaatgtctcaaagctgtgcagtcttttgttactgggacacttttaaactctgaataggcattaaaaaaaatatggctaa

SEQ ID NO: 1811 - DNA, 7124 bp, HOMO SAPIENS; identical to SEQ ID NO: 1188

SEQ ID NO: 1812 - DNA, 412 bp, HOMO SAPIENS
  misc_feature (142)..(147): n is a, c, g, or t
  misc_feature (149)..(154): n is a, c, g, or t
  misc_feature (162)..(162): n is a, c, g, or t
  misc_feature (186)..(186): n is a, c, g, or t
tattgtcgcaaaatgatttcctcccactcagttttgacttttgcagagcttctacttaccatttgtagtaacctgaatgacgataaaatggtgaaaaaaagatttgaaatggtgaaaccgccttgttccagatttcattcannnnnntnnnnnncaaaaccnagtacaatagacaaataatagcancactagaaaacaagaaatactaccgtcaatagagcagcaatttctaggtatttttggaagacaggagggacatagggattgacaggtgtttgttggtgtcagtgtgagcaaaccacgtaagctgagtgaagcagaaatggagaggtctcaccaattctgagtagtgagggctagtaacaaagattaaccctaaggtgggtggacatgggtgtgtggtggctggttc

SEQ ID NO: 1813 - DNA, 4158 bp, HOMO SAPIENS
ggcgcgtcccgccagcctgccctcggccgcaggcgactggacggcggttacggggcggtcccagcgccaccacgactggctgtcggctccgccagtcatgggctgatgacgccccggggctggctccgcccctagcggcagccccgcctcccctccagagcctggtcggcttagccctgctttccgcctcactcgttgagcaggtccgtgaattgtcagcgcgctgtgggcgactgtgtggccgcggcggccgccaggcttgccgcactccccctgaggtgcccgccggaaccaatgtgccctggtccactgggccgtgagcagccaccgactgggggcaacttggcacttagaaccgcagcagggacgtcggtttgctatcgggactcggcgaggacgatggaaatcctgtatgaatgtggaagccattagcagagtaattgctgtctgttaccatgacaaccagccgctgcagtcacctgcccgaagtcctgccagactgcaccagctcagctgcacccgtggtgaagacggtggaggattgtggcagcctagtgaatgggcagccgcagtatgtcatgcaagtttcagccaaggacgggcagctgctgtcaacagtagtgcggactcttgccacccagagccccttcaatgaccggccgatgtgcaggatctgccacgagggcagcagccaagaggacttgctctctccatgtgaatgtacagggaccttggggacaattcatcggagctgcctggagcactggctgtcatcctcaaacaccagctactgtgaactctgccacttcaggtttgcagtcgagcgcaaacccaggccgttagtggagtggctgagaaaccctggcccccagcatgagaagcggactctgtttggcgacatggtgtgcttcttgtttataactcccctggccaccatctcgggctggctgtgcctgcggggcgccgtggaccacctgcactttagtagtcggctggaagccgtcggactgattgcactcactgtcgcactcttcactatttacctcttttggacactagtgtcatttaggtaccactgtcgattgtacaacgagtggcgtcggaccaatcagagggtgattctcctcattccaaagtctgtcaatgtaccttctaaccagccgtccttgctgggcctccattcggtcaagaggaactcaaaggagacagttgtttgatgtttgtatggttggttggttgtttgattcattgtttggggtttggaagtgtctgcactggggtcatgcactgagcgacccccaagcccttccttaagcctgtgggtctaagaacatccagagcatattagcacatcactccaagcaacaacctccgccagaagaaagcaaatgctgttttacttcaaatgatggatgctgcaatcatatgatatttgctaagctgccaaacatgtttatttagcagatactgtatggaattttctgaacacctctttaacgtatgaggaaggttgtcctgctacggatgcaattcaattcttccttttttattactatttcaaacacacacacatatatatatatattaaacttagatgataatcaaaatcaaaaagtcaacgtaaaaactggtttcttggtttggttgggtcttatttgagttagtttgtttctcagtttctcgtatggattctttggggtactttggtagcctgagtggtctttttcatctctttcgcgtccattactcaaggagacagcataacagatgcagaacaagtcatatttgaagaatgttttgtactaaacttcatttaattattcagtttttaaagggaaaaagggcgtgagctcacacagtgagctgtttatttaaatatcattaaggagaaaaaaaaatatggtgagaagctcgctcctttcaacttgtttggtactgacagctgatagaagctattttctaataataaacatccagtgtgtgaaagacaaaacccactgattgcaatactctttttttaatgataaaacctgtgaagtttcccaaagcaggttttaaaaggaaaaaaaggaaaagcaaaaaggttgctgttctcactcccatctcatttagtgcatgtcttaattcgggattcgtaatgaattggaggatcattagacatttctaggaaccctagacctgttttgcatgtcaattagcattcccattgctctattgaatttctagcttgacaggtagatgtggcaaaaaaaaaaaaaaaaaaaaaagcctgtcctagcagccctgcacttattctaagacccctttgtctgattctttaaaaaggagccccacacagtgccttcccccaaccatgagccaattctgtcacagtccgaaatagactttttctaagggtttcgtgtccctcttttatccgtcgcagtgtaaagggtctgatccgcagcctgcattgtgcgcgcaccgaggcaggagcggatgtcttctgaggagagcgctggctggggttgactctcaggctcccggctgtccgcccgcccacacgcagcgaggaggggcggagccctgcttccggaatgcttaaaatatggaattctagaacatgacccacattctgagtatcactccagcatctgccttgtgttccaagtgggaaaacgagaagtgcaaaggaacaggcagcgaggagggtagcgatttttgtctgcaaattgatggagctgatgcaggtgtcccctttgtaggcgagccctccattcactggctgctcccagcgctgcctggggagggaaacagctgtactgctctccgctgcaaaactcagatgtgctttatggcttgtgacaatagatttcctccccaccacgcttcactgggacacttcaattccagtaatatatgtctcagcccttctgtttactgcgccctgctcacccccctgggctgtcattagctgcaccaccatcaaccgtttcttaattgacctttttaaaatgctggacatcaccggctgcacgcagctgccacacattaaatttccagagcaaagagtccaacttggtagctggtgaattgcagccctgtaatatacttaataaatgacgtccacccagccttagtccctgagctgtcaggtgaacccgtgacacgtctcaactgaatggcacaacattcatgagaggaccataccccttctccctgtttcttgcatgaattaaggaagcagcggatttccaggatgatttcctgtcaaggttggctgcagagaattcctgccatcttggttcatgagatgagatatgacatcatcaaaggcagccaggtcccaggccgttcaatggggatcctgcattaggaagggtttgcacattaaaactgtgcctgtgccacacctctttccttcgtgtttgcatccctgccctgtgaagtaaaacagagtccaagatgcaaggagtagattgtgtgtggggtggtgaaaggacacccctggcagccaggcagagcatcagtgcctcccttcccaggtcaccagcttgggacctccttgtgagaggctctgatctccatcagcatcagggcccataggggattctgaactcttggaggatatttcatcccctccaagccttgccccatggaaagggctacacctcctgcaggaaggggtgccttttgttaacaggtattaatgggtacagaggcaccatgcagcctaccagcacccttgctagcctagtcctcttcctgtgcttctttttgaaagatcaagaatgaagaggaagagatgaggagtgggggtcctttacctaaaggaccctcgtggttcattgcttctctttaactgactttttaaaaaaactccctcttccacactccttgctgtgattctgtcctaatcatttttcttgagaatgtcatgtagagataaatgtgtgtcacagtgaagccagaaggtgaattaacaactaagacaaatccagcatgctcttgcctgccctgcatatgtgctcatttggggaaggacggaggacacagagcatcgacacaaattctacagctcctcagagaacacagcagagactcagatgagctgtaaaatccattaaggaaaaataaatggcatgatttggaagttaaaaaaaaaaaaaaaaaaaaaaa

SEQ ID NO: 1814 - DNA, 7895 bp, HOMO SAPIENS
ggggggcgctgggtgtggggcggctccggggccggggatggcggcggccgcggttgcggcggctccgggacgagtgagtggatcctgggaagcgctgtgaaatgggctggctcccgagccagccgggaggacacttactacagctgctcagaagcaccactggaaactcagatgtgggcgccccagccagaagcagagaggggtacagggaagctacagagaagccccttctgatgccccagggagcaagtcgactccttccaggctccaggaacaccacaaagcaatatgaaacctgttcatgaaaggagtcaggaatgccttccaccaaagaaacgagacctccccgtgaccagcgaggatatggggagaactaccagctgctccactaaccacacaccctccagtgatgcttctgaatggtcccgaggggttgtggtggctgggcagagccaggcaggagccagagtcagcctggggggtgatggagctgaggccatcaccggtctgacagtggaccagtatggcatgctgtataaggtggctgtgccgcctgccaccttttcaccaactggactcccatctgtggtgaatatgagtcccttgcccccaacgtttaatgtagcgtcttcactaattcaacatccaggcatccactatcctccactccactatgctcagctcccatccacctcgctgcagttcattgggtctccttatagccttccctatgctgtgccacctaatttcctaccgagtcccctcctatctccttctgccaaccttgccacctctcaccttccacactttgtgccatatgcctcacttctggctgaaggagccactcctcccccacaggctccctccccggcccactcatttaacaaagctccctctgccacctccccatctgggcaattgccacatcattcaagtactcagccgctggaccttgctccaggtcggatgcccatttattatcagatgtccaggctacctgctgggtatactttgcatgaaacccctccagcaggtgccagcccagttcttacccctcaggagagccagtctgctctggaagcagctgctgcaaatggaggacagagaccacgagagcgaaatttagtaagacgggaaagtgaagcccttgactcccccaacagcaagggtgaaggccagggactggtgccagtggtagaatgtgtggtggatggacagttgttttcaggttctcagactccacgggtagaggtagcagcaccagcacaccgggggaccccggacactgaccttgaggtccagcgggtggttggcgctttagcttctcaggactatcgtgtggtggcagctcagaggaaggaggaacccagccccctcaacctatcccatcatacccccgaccatcagggtgaggggcgagggtcagccaggaaccctgcagagctggcagagaaaagtcaggcccgtgggttctaccctcagtcccatcaggaaccagtaaaacatagacctttacccaaagcaatggttgtagccaatggcaacctggtgcccactggaactgactcaggcctgctgcctgtgggctcggagatcctggtagcatcaagtctggacgtgcaggccagagccaccttcccagacaaggagccaacgccgccccccattacctcctctcacttgccttcccatttcatgaaaggcgccatcatccagctggctacgggagagctgaagcgggtggaggacctccagacccaggattttgtgcgcagtgccgaagtgagcggggggctgaagattgactctagcacggtcgtggacattcaggagagccaatggcctggatttgtcatgctgcattttgtggttggtgagcagcagagcaaagtgagcatcgaagtgccccccgagcaccccttctttgtatatggccagggttggtcctcttgcagccctgggcggacgacacaactcttctctctgccctgccatcggctacaggtgggagatgtctgcatctctatcagtttacagagcttgaacagtaactcagtttctcaggccagctgtgctcccccaagccagctgggtcccccccgagaaaggcctgagaggacggtcttgggatccagagagctatgtgacagtgaggggaagagccagccggcaggagagggctcccgtgtggtagagccttcccagcctgagtccggtgctcaggcctgctggccagccccgagcttccaaagatacagcatgcaaggggaggaggcacgggctgcgctgctccgtccctctttcattccacaggaggtaaagctgtccattgaagggcgttccaatgcgggaaaatgaacctcttccccagaccaggactggggctttaccccagagcctcgcctcgccgccgtgagcaggcagaggatttgcacacgccgagcagggaatggctttcttggcagtgagatttgggggaaaggggaggcatgaagtcagcctcccaaggcaggatctgttgttcattaccccatggcatcctttcaggacaaccccagagggtgttgtgatggggagcagcaggcctggggcaaggaaggaagggggtgcacacaggagaagaaacattccaaaatcagggcctccctgttctttcctccccatccctagctcctgcaagagaaagtccaggctttgggagcagatggcagagggagggagtaaagaaagagccaaaaatgatgatccacagcttatagtagcagttaaactgtcagaagttttttttcttttttgtggtagaagggcaggaggccccaaggttggaaataagagggttcccacccagaacccttcttgtgagagatgcgcactttaaagggtgattttgttccagatgtctatggctgggtgtgtgggggaggagcactctcatctgcaggactctgcttgatcctctgcttcatagcccttccccatctctcctcaccattctgcctacaaggcttctagcagcacgggggcccggagggagagccccttcagggttcagagtgaagtactaccttgccagggactcagtcaggggactttgggagaaagacttgatagccaggctgactgggttctaggcaggccctctggaaaggtagctcacctaacaaagctcctccatctcagcatgccagacccactttgaaatctcacagaatcttgctggtaatggtgactttagaactagtagaccctttttcccaggcactgaccccccacctttgtctgtgttgtgcccaagtgcctgcgccacccccaccctcctgctgcgctgaccgctgcatggtgtcgtgacctgggcctcatttgtagctgcactgcctttccttgtctgcaaagttggttttgtccactctgaccaagacctctagtttttggtgggtagggggtctctctggtttccccttcagctataatctctatttttaaaatctcaaaatcatgtcccctccacttccactgccaaacagcttggtgaagaaacaagaagggaactatgccctgggccagggcgaatgcgtggctgggcagtgcccatcatggcattttcacatgtcccatatgcccctcctgtcttattccactgcttctcccagcattctggtgcctccaagccatcccctcccaccaccagctctaagattctaggatagtcttgataacatttcagtacctgaatagatgtcattttgtgttggtatattcctctgcaaaaagtattttcaatcttggttgcattggcaccccccctaccccccaccaatgtcttaatcccacattttcttcacaacttttagcatcagctcagaccgtggggttccactgggtattgggaattaggctcccccactagctttcaggtgggtaagtttttttgtttgttttttgggggtctttagactcttgaaggcaactcagggtattgtccacgcagctctctggttagacttctcccaggctatgatcctggcatgtcctttataaggtatacttggattggccgagacctggcctggcatcaggagtccaaacctctgaggtctgatctctgctctgtcaaggactttcggcaagtctcgtgacctctggctctttcacttcctccccacctgccaaatggggataaataatcttacctacctcctggggggaggggaagttctgagaatggagtcattcttagtgttcaggtgctaaaggttgttctcctgggggaacagagtgactgaaactggcttgtttgctacaagccctaccctccactctttcattccttgaaagcagtttgcctggtcagtcagcttttgggggtccatcaaaggaggttgctgacctgaccgtgagtgcttcagtatctggtttgtgtcagaaccagacgccaactttgtactgcatttgggatcatatctttccccttctctgtcccccattctctgaatgctgctttctctggcttgtttcctacagtgggggcctgtggggttgagtcttgaggaatcccctcaaatgagaaggccttgggagaaggcctcatctctggctgtttcatgagcaactcattcctagagttcattgtttgcatgggtttctcacaagcgtccttcctcataggaaggctcatcaactgaatttagtgacatgtacacagtagatgctcaagcagtgtctgcaaggacacaagctgagctttctccttatggggcaaacctatgtctaaccagatacagaccaattagtttagatcaaatcaccttccacttgggctacttgtgactttccaacctggtaacttccactgaattctggaaagagaaattcttgaggaccctggcaagttgggccctgacctttctgttgctgtctcttgctggtgaagcaataccagcagttcctgtaataccacaatatcgttccatgcatatataacatattaatacttgattttgctgagctgcaaaggtatctgtcataaaatatggtccccaggaaaagaatctctgtgctctaaatctcggtcagagctgtggcctcccccttgcctttaacctctagtttagtcttttcctccaggcatgaaaaatatgactaacctgtggtgtgtccattcttccttataggaatttcctgagtttgcaggagacatgagagcagtttttagcgagtattttagtgggaagttgccaactttttaagaatgagcagttgacaagggccagagcctgtcccttgtcagcagtaggacatttccagctcttaggaatagaaaggaggactgctgactgtctggcgctgtataaaaatgtgtataccaatttgggaataggggaacccagtcatggatggataataagccaagtcttgaatcattcctatcaagattagtatacatgaggaagaggtggcatggggggaaggggctctgggagttcagagctgagtacttgtacctgagggagggcccccagccaatctgggctggtccttctatattcttggtcccagttggtcataacaccaagggctttgccctgcgctgctttgccactgctgctgtccgctcactgtcctgcctgctgtcctctacagctccctatccttccatgtctttggccatgtagattaagtgtaggcgtccggttcattcttacctgtgttaggccatgttattttatagcgaagtcatgttcgatagggatggtatgaaatgctgctggtgggctggtaaatccaaagggataaggcttcagtgctgttgggagccctctggctccaaatgtctgactatcttgagggagaaacaagcaggtttctactagtggtgtcttctgttgtattaacttctttcctttgtggtatcttgtatcctgttttaaaaactaaatgaagggaaccacattagggcccatgccagcatcccagtgaagttcgtccagctccagttaggtggattctggagttcggagagggtttaaagtttggctgaaatagcacctcaagtggggtttagttttatttttacctgcgggcatcatgggcgatttagggggaagcacaggatggtggtgtggtttaaacctgcagcaagcaggcatgttgaagagttgagtgatcacgctggagatgaagggttggacatggattgactgggaaaaggcctgggtccattggagtaaagataacctagtcgattgaattggccatgggaagttaggtcacagtcttataaacaaagtaaataggacagagactaagttttagggagacatcttggcctcctaggctaagtttactaaaccacactgaagctatagtaccttccagatgggcaaaagtgtacactacagttgaggagctgaaccttattaggttggatgtcgatcaggaacctgtttgccctttgctgggaagccttcactctccagctttcctggggtagggaaggtctcccacattatgcaataataaaataagcatctgggtctttgcagctgtcagttgctctttcaactctaggatccatctttggaccagaagcctggtctgtgcctaggatgacactggccccagagatgctagagtcgactgcactctctccttagctgcagaccatgcacagtgcctggggcggaaggaggagaggtgttgcggtttgccctgctgcctccccagcaggaacaatagtcataaatgcacttttcacactaaaggtttctttattagttctccagttaaacctagatccctccctggtagattgcgaactcaaagttttgtgatcccaaagccattccactgcaaatgcccagcagtgaagatggcctcaaattgggttcttgcctgcagtgtgtgtggcagcagcccatgtgcctttacctgttgtcaaacttgcaagcatttatttgtctttatgactgtcatggggactgaggttcttcagagaaagagtgtgagctgatgacacagtggttttacacccaccccctgggcagggagtttgcacgtagttgtgagctgtgagtggttagtgcattgctggtattgctgaaggcagggttgatccctcacttgactgatacttgcattcaagagaatctagattgtgttgggggagggactgactgtactcatggctaacttaaagtattaaaataaggctgtcccctacaaccttcttagtcacacaggatccctgtagccaaaacagtatatgatccagctgcagagagcagactgctctcagcttgcacagcaccttaggcgagggaagaatatacggatagggaatggggtggagaaaggatgggaatgttgtcatccaggtggctttagggtcctaaggagtggagaaggatggcactggggaggtctggatggatctgtgtaggagttccctgtagataaattactgatcccccatctactatccccagtatgtaatggctgaattaatatgtaatcaactgcattgtatctaaagccttagaactagtcaggtgctccctccacccaataccatttcttaccctctaatcctacctgatctttaacaaagcattaataattctaaggataatctctattttgttgtgcttttttgtaactgttttaaataaatcaatttgtactgtatatttgtacttttgtgagatcctttttgctgttttaccattttaagtctctgtacttggctacacacagattgtatttttattgttaatgctcttcttatggatacctgcatttaacttgtggactatgtaaacacaatatctatcaatatctatatatctatatatctatctatataaactactagcttttcaaaaaaaaaaaaaaaaaaa

SEQ ID NO: 1815 - DNA, 1869 bp, HOMO SAPIENS
ggagtttgagtgagagatatagggaaggaagggaagtaagcagtcacagacgctggcggccaccagaagtttgagcctctttggtagcaggaggctggaagaaaggacagaagtagctctggctgtgatggggatcttactgggcctgctactcctggggcacctaacagtggacacttatggccgtcccatcctggaagtgccagagagtgtaacaggaccttggaaaggggatgtgaatcttccctgcacctatgaccccctgcaaggctacacccaagtcttggtgaagtggctggtacaacgtggctcagaccctgtcaccatctttctacgtgactcttctggagaccatatccagcaggcaaagtaccagggccgcctgcatgtgagccacaaggttccaggagatgtatccctccaattgagcaccctggagatggatgaccggagccactacacgtgtgaagtcacctggcagactcctgatggcaaccaagtcgtgagagataagattactgagctccgtgtccagaaactctctgtctccaagcccacagtgacaactggcagcggttatggcttcacggtgccccagggaatgaggattagccttcaatgccaggctcggggttctcctcccatcagttatatttggtataagcaacagactaataaccaggaacccatcaaagtagcaaccctaagtaccttactcttcaagcctgcggtgatagccgactcaggctcctatttctgcactgccaagggccaggttggctctgagcagcacagcgacattgtgaagtttgtggtcaaagactcctcaaagctactcaagaccaagactgaggcacctacaaccatgacataccccttgaaagcaacatctacagtgaagcagtcctgggactggaccactgacatggatggctaccttggagagaccagtgctgggccaggaaagagcctgcctgtctttgccatcatcctcatcatctccttgtgctgtatggtggtttttaccatggcctatatcatgctctgtcggaagacatcccaacaagagcatgtctacgaagcagccagggcacatgccagagaggccaacgactctggagaaaccatgagggtggccatcttcgcaagtggctgctccagtgatgagccaacttcccagaatctgggcaacaactactctgatgagccctgcataggacaggagtaccagatcatcgcccagatcaatggcaactacgcccgcctgctggacacagttcctctggattatgagtttctggccactgagggcaaaagtgtctgttaaaaatgccccattaggccaggatctgctgacataattgcctagtcagtccttgccttctgcatggccttcttccctgctacctctcttcctggatagcccaaagtgtccgcctaccaacactggagccgctgggagtcactggctttgccctggaatttgccagatgcatctcaagtaagccagctgctggatttggctctgggcccttctagtatctctgccgggggcttctggtactcctctctaaataccagagggaagatgcccatagcactaggacttggtcatcatgcctacagacactattcaactttggcatcttgccaccagaagacccgagggaggctcagctctgccagctcagaggaccagctatatccaggatcatttctctttcttcagggccagacagcttttaattgaaattgttatttcacaggccagggttcagttctgctcctccactataagtctaatgttctgactctctcctggtgctcaataaatatctaatcataacagcaaaaaaaaaaaaaaaaaaa

SEQ ID NO: 1816 - DNA, 1144 bp, HOMO SAPIENS
aacggtgcgctggagcgagtgagcagcgatacctagggcggaagtgctctcggcggaagtgatcgctgtgtgaatcgtgggtgggatggccgcgggccgcctctttctaagtcggcttcgagcacccttcagttccatggccaagagcccactcgagggcgtttcctcctccagaggcctgcacgcggggcgcgggccccgaaggctctccatcgaaggcaacattgctgtgggaaagtccacgtttgtgaagttactcacgaaaacttacccagaatggcacgtagctacagaacctgtagcaacatggcagaatatccaggctgctggcacccaaaaagcctgcactgcccaaagtcttggaaacttgctggatatgatgtaccgggagccagcacgatggtcctacacattccagacattttcctttttgagccgcctgaaagtacagctggagcccttccctgagaaactcttacaggccaggaagccagtacagatctttgagaggtctgtgtacagtgacaggtatatctttgcaaagaatctttttgaaaatggttccctcagtgacatcgagtggcatatctatcaggactggcattcttttctcctgtgggagtttgccagccggatcacattacatggcttcatctacctccaggcttctccccaggtttgtttgaagagactgtaccagagggccagggaggaggagaaaggaattgagctggcctatctagagcagctgcatggccaacacgaagcctggcttattcacaagacaacgaagctccactttgaggctctgatgaacattccagtgctggtgttggatgtcaatgatgatttttctgaggaagtaaccaaacaagaagacctcatgagagaggtaaacacctttgtaaagaatctgtaaccaataccatgaagttcaggctgtgatctgggctccctgactttctgaagctagaaaaatgttgtgtctcccaaccacctttccatccccagcccctctcatccctggagcactctgccgctcaagagctggtttgttaattattgttagactttgccattgttttcttttgtacctgaagcattttgaaaataaagtttacttaagttatgcttgtttttctaa

SEQ ID NO: 1817 - DNA, 4848 bp, HOMO SAPIENS
gactgcgcggcgggctgtggctgcggaggttgaggggcgtccgaggcgcggaggggctggctgggcaggaggggttggcggggcagcagggccgcggccatggggagcttgaaggaggagctgctcaaagccatctggcacgccttcaccgcactcgaccaggaccacagcggcaaggtctccaagtcccagctcaaggtcctttcccataacctgtgcacggtgctgaaggttcctcatgacccagttgcccttgaagagcacttcagggatgatgatgagggtccagtgtccaaccagggctacatgccttatttaaacaggttcattttggaaaaggtccaagacaactttgacaagattgaattcaataggatgtgttggaccctctgtgtcaaaaaaaacctcacaaagaatcccctgctcattacagaagaagatgcatttaaaatatgggttattttcaactttttatctgaggacaagtatccattaattattgtgtcagaagagattgaatacctgcttaagaagcttacagaagctatgggaggaggttggcagcaagaacaatttgaacattataaaatcaactttgatgacagtaaaaatggcctttctgcatgggaacttattgagcttattggaaatggacagtttagcaaaggcatggaccggcagactgtgtctatggcaattaatgaagtctttaatgaacttatattagatgtgttaaagcagggttacatgatgaaaaagggccacagacggaaaaactggactgaaagatggtttgtactaaaacccaacataatttcttactatgtgagtgaggatctgaaggataagaaaggagacattctcttggatgaaaattgctgtgtagagtccttgcctgacaaagatggaaagaaatgcctttttctcgtaaaatgttttgataagacttttgaaatcagtgcttcagataagaagaagaaacaggagtggattcaagccattcattctactattcatctgttgaagctgggcagccctccaccacacaaagaagcccgccagcgtcggaaagaactccggaagaagcagctggctgaacaagaggaactggagcgacaaatgaaggaactccaggccgccaacgaaagcaagcagcaggagctggaggccgtgcggaagaaactggaggaagcagcatctcgtgcagcagaagaggaaaagaaacgccttcagactcaagtggaacttcaggccaggttcagcacagagctggaaagagagaagcttatcagacagcagatggaagaacaggttgctcaaaagtcctctgaactggaacagtatttacagcgagtacgggagctggaagacatgtacctaaagctgcaggaggctcttgaagatgagagacaggcccggcaagatgaagagacagtgcggaagcttcaggccaggttgttggaggaagagtcttccaagagggctgaactagaaaagtggcacttggagcagcagcaggccattcagacaaccgaggcggagaagcaggagttggagaatcagcgtgtcctgaaggaacaggccctgcaggaggccatggagcagctggagcagcttgagttagaacggaagcaagcacttgagcagtacgaggaagttaaaaagaagctggagatggcaactaataagaccaagagctggaaggacaaagtggcccatcatgaaggattaattcgactgatagaaccaggttcaaagaaccctcacctgatcactaactggggacctgcagctttcactgaggcagaacttgaagagagagagaagaactggaaagagaaaaagaccacggagtgactgagcttgctggcagtcacgtcagttatgtagatactgcatggcaggagagctttacgctaaagacaaaagaaacagctttgggggccgggcgtggtggctcacgcctgtaatcccagcactttgggaggccgaggcgggtggatcacctgaggtcaggagttcaagagcagcctggccaacctggtgaaaccctgtctctactaaaaatacaaaaaaaattagctgagcgtggtggcgggcgcctgtaatcccagctacttgggaggctgaggcaggagaatcacttgaacgtgggaggcggaggttgcagcgagctgagatcatgccgttgtactccagcttgggcaacagagtgagactccatctcaaaacaaaacaaaacaaaacaaaacaaaaaaacccggctttgctgcttttaactcttcttccttctgtgcctctctaagtgggtcagtatcctaaggaagccttcttatttatcttcctgcaaacaagggttacctgaaaagaaaaaaaaagtcaacattgtcaagctgtttgtttactctttctttgaaaacatcaccttctgaaatttgtcttttagctctctcagattcttccccaaatgaggcagggtgcagacagcacagtcagctctgcagagtttggaggggctcactgccactgggtactcagaacctctgtggactggatgtcagctctttcctttggcagcgtgtttccttttccgagtatgtgctgttaaactagattggccggttcgctttccatttcctgacacttgacatggaatgcctttgaccattggtgctctgacagagaagtcatggagtcattgccatttcctggttgcccttttggaatgtgatcctgttagtagaggttttctagcttctactaagatatttctttccctaaccatcatacacttggcatgtttcattcccatctcctttcccctcaccttaaaggagactacccctttgccccatattgtcaacctaattttctctcgtactctctctagtgaatgatgtgctaccaagtatatgccaggctgtgagaggattatactgagtagtagaaagaagctaatttgaaataaaaattatttgtataattaagaaagcagattagatgcacatggtcaacaggaagttgactgtatgtctgctagttagattcaaaacatcataaagatgatagcatgtcaatatattagcctagccattatgttagcctttgttaggtgggcagcttttctgctttttcccttcctctgtggtgacaacggaggaaatatccaacagaaatacgtctaacagggaaattgggatcatagtttatatgcatctgatttgaaaggagtattgaggaaggttttcatatatgatctatctttggattaaaaagaacatttatgaaatcaagccttctaacactagttataattgagaagcaacagtaactccgtggacagcaatcaagcttaaaattgtaaataaatatggggataattcagttgttgcaaaaaaagggcagaattcagtagaataaagtccttttctcttacaggtattaaatgaggacagagaacctcaggtgttcttatgctagtgcttgctgagtgcatactaagaaagcaattccaaatagatgtatacatctagagagagtggtattagagattcagtgtatgtatttatttacatgagaggaaactggaatataatcccataaattatcaccttttatgactggaaaatatttgccaatgaagaaatggtctgtaggtatttgtcttaagatttttggctgtttaataaaaatgtaactttaacggtttcttatagttgcctttataaagtgtattgtctaaaatatttttgtatcatgtgcctttgaaatttgacagctgatttgggtgttggatttctgcccagccatttatcagtattatcattttattcagtagctggcaggtgtattagaccaacgagacttaggtaaggaatggaacctttcctgtggtttgactgcacattacaccagaagactccagtatccctcattccagaatgaggaaaaagtattctacaaagaacctaatcacctctgtgaaatctatgggatggaaacagtgtggccttaggagtcaaatagtctctgcatggtggggaggatcatgatggaatatgtgaatttctacttctagaagttgtgaaataggtcctgcacttttgcagaatgtccttctttaaacctggcttattccacagctgtagctgataacatgacctggggcttagctgctctagccctgggttcttggagacctcacactgcctggcccctggccatccacctaaggactgcctgctttctggtcacatgtggaccttgatacgactaagcggttacatatgtggttgtgcaaaagctttctgtttaatgcatagtgttaccgatttacatcttggttttcagtggcactatgtctaggaggcaatatccttttaaacagtgctttggctaagatagatacttgtgaatcaaagatagcacagaaatgaactaagtatatcccatttggaattatattttgatactatttaaaatggtttcacctgttaaagggccaacagaactcttggttttacttttgtaattactgtacagaaaatttcaagagtgtttgagtgcttgtcatcaggtgttttccttaataagtagggatatgatcatttacaggaattatatatgaaaaaagtttttgaaatgtatttttgtgatgtgctatgttgaggggaaaccaaatatttatgattttaaaacattcgtatgaaaacattgtacaatgtaatatgctcaactttctcaattttttgctaatttttctaagatacattaaaaatgttttatatttttttttaagtaaaatggacccagtaagaaaattaaaaataccagaacatacactttaaa

SEQ ID NO: 1818 - DNA, 4165 bp, HOMO SAPIENS; identical to SEQ ID NO: 1700

SEQ ID NO: 1819 - DNA, 2953 bp, HOMO SAPIENS
agagccatagcaggctgctgtctcacagagcgagaaggtgtcaggagcagcccagttgtgtctctctctctacctctgtgaagggcgcgaatgggcagagcagaacttctagaagggaagatgagcacccaggatccctcagatctgtggagcagatccgatggagaggctgagctgctccaggacttggggtggtatcacggcaacctcacacgccatgctgctgaagctcttctcctctcaaatggatgtgacggcagctaccttctgagggacagcaatgagaccaccgggctgtactctctctctgtgagggccaaagattctgttaaacactttcatgttgaatatactggatattcatttaaatttggctttaatgaattctcatctttgaaggattttgtcaagcattttgcaaatcagcctttgattggaagcgagacaggcactctgatggttctaaaacatccctacccaagaaaagtggaagaaccctccatttatgaatctgtccgggttcacacagcaatgcagacaggaagaacagaagatgaccttgtgcccacagcaccttctctgggcaccaaagaaggttacctcaccaaacagggaggcctggtcaagacctggaaaacaagatggtttactctgcacaggaatgaactgaaatacttcaaagaccagatgtcaccagaaccaattcggatcctagacctaacagaatgttcagctgtacaattcgattattcacaagaaagggtaaactgtttttgtttggtatttccattcaggacattttatctctgtgcaaagaccggagtagaagctgatgagtggatcaagatattacgctggaaattgtcacaaataagaaaacagctcaaccaaggggaaggcacgatccgatctcggtcgttcatctttaaatagatctttcttgccaaggaatgctctggcccaggagcaaggtggaatgtttccctgacgctgtgatctgcagcaggcttcaaatgaaaaccgactaaggattttctttcaaaaacaaatcagaagcagatgctgattgggacccatataccacgttgctgactcacgttgctgcccttccatgatgttgccatctccttgagaacactgaagcaatcaccattctgatagaaagtgcttaaaccaccactcttaggtctgctcactcttagaacacacaatggaagaggaagggtttttgttttcactcattgtggtccccaagcctattgacactagttgcctagagtcccactgtgagtcatggtcagcctgtctgacatccaggttgtgctattaaccaagaaggaaacagatacttggaggcttagatgacttctgcaggatttatattcagatagaaaacatcaaatattttcaggggagaggtttttttttttaatttttccccctttatacaaaaaaaaaagaacatttccaaaactaaaatagaaaatgcttgtggcatttattttctctttttaaaaggttcagaaatttggcaggtcctttgcttctaatgacaaaactgtgagagctagatgtcctatgggcaattaggtagtataataaaggtaaatgaaggtacaatttttaaaccattattttcaccctgttggggtaaatgttttaaagagtgagaaaacataaattgagaaagggtgataaagtaatagataacttttagtttaataataattattgttattatactactaataatagagcacttgtaagcactaagttatctttatccaacatttctccaaatggactgaaagaaacttttcaaggacagtgtattataacaatccctttcccagaattagttgtatagggttggcccaagagatgtaagaaaaatctcgcattgctccctaagcaccctgggccttattaaagagcaacttctatttccagtcgggggagtaacactaaagctacaagaaatatgtaataatgataggtaataatgtgttccaaagctttttcaaactagaataaggaggcaaatagaagaatgagatactgatgtccacagttcattggcagaatctaaccccttctgttatcttttttaatactatttttgtttagatagaagtttcaaagaagataaaaatgcttgaagagcctgagagtaaaaagattatgctgcaaagctatgatataaactgctcttgcagtccaaagggatacctgattaaagaagtttcttatttaaacatctcagacgcaaaaattacattaaatttttgtatatttcaacaacattttaaatgtattttgttatgtttgtattatataggataaagcaaatgtcaagttaaaatgtattgtgttgtttgtaaagtaagaagttactggccaggagcggcggctcatgcctgtaatcccaggactttggtaggccaagacaagcagatcacttgaggtcaggagttcaacatcagcctggccaacatgatgaaaccttgtctttactaaaaatacaaaaattagctgggcatggtggcaggcgcctgtaatcccagctactcaggaggctgaggcaggagaattgcttgaacccgggaggtggaggttgcagtgaaccaagatcgcggcgctgcactctagcctgggtgacagagtcagactccgtcccaaaaaaacaaacaaacaaaacaaaacaaaaaaaaacagaagttacaaatgaatactcacggatatgtatagttttatgtttgttttcttagaaacaaatgtgtttctttgggtgggtaatattgtgttttactatgtttaccttttataaaacataacctgtttatttatattctttggctttgtttattaaaaagcatgattttgctgtgcatgtaccattttgctattaaaatttatttttaatatttgtaacttgaaaaaaaaaaaaaaaaaa

SEQ ID NO: 1820 - DNA, 15216 bp, HOMO SAPIENS
gtctttccctttgacaagtcgctgctgctgcagcaaaaataaaggacgcgaccgccgcagcctctgcggagccgggctcgggtcgccggagccgcgccccaccccgccagctccagagccacgactaatggctgaaggataaatcaacatggcaactatgattccaccagtgaagctgaaatggcttgaacacttgaacagctcctggattacagaggacagtgaatctattgctacaagagagggagttgctgttctgtattctaaactggttagcaataaggaagtagtacctttgccccaacaagttttatgcctcaaaggaccacagttgccagactttgaacgtgagtctctttcaagtgatgagcaggaccactatttggatgcccttcttagcagccagctagcattggcaaagatggtatgttcagattccccatttgccggggcacttagaaaacgactgcttgtactccagcgtgtcttttatgcactttctaataaataccatgacaaaggcaaggtgaagcagcagcagcattctccggagagcagttctggttcagcagatgtccattctgttagtgaacgcccccggtcaagcactgatgcacttatagaaatgggtgttcgaactggtctaagtttattatttgcgcttctaagacaaagttggatgatgcctgtgtcaggacctggtctcagtctttgcaacgatgtcattcatactgcaattgaagttgtgagctctttgccaccattatcattagcaaatgaaagcaagattcctcctatgggcttggactgcttatcgcaagtaacaacatttcttaaaggagtcactattcctaattctggggcagacactttaggtcgtagattagcttctgagttgctgcttggtttggcagctcaacgaggctcattgcgatatcttcttgaatggatagaaatggctttgggggcttcggcagttgtacacaccatggagaaaggcaaactactctcaagccaggaaggaatgatcagctttgactgctttatgaccatattaatgcagatgaggcgttctttgggttcatctgctgatcggagtcagtggagagaaccaaccagaacatcggatggcttgtgctccctttacgaggcagcattatgtctctttgaagaggtttgcagaatggcttctgattattcgagaacatgtgctagcccagatagcattcagactggtgatgctcccattgtctccgaaacctgtgaggtttatgtttgggggagcaatagcagccatcagttggtagaaggtacacaggagaaaatactgcaacccaaactggctcctagtttctctgatgcacagaccattgaagctggacagtactgcacttttgtcatttctacggatggctctgttagagcttgcgggaaaggcagctatgggagactgggccttggagactccaataatcagtcaactttaaaaaagttaacattcgagcctcacagatccattaaaaaggtttcatcttctaaaggatctgatggtcacactttagcctttacgacagaaggagaagtcttcagttggggagatggtgattatgggaaactggggcatggaaatagttcaacacagaaatatcccaagcttattcagggacctctacaaggaaaggtagttgtttgtgtgtcagctggatacagacatagtgctgctgtcacagaggatggggaattatacacatggggtgaaggagactttggaagattaggtcatggtgacagcaatagtcgtaacattccaacattagtaaaagacatcagcaatgtaggagaggtttcttgtggcagttcacatactattgctctgtctaaagatgggagaactgtatggtcttttggaggaggagacaatggtaaacttggtcatggtgataccaacagagtgtataaacctaaagttattgaagctttacaaggaatgttcattcgcaaagtttgtgctgggagccagtcttcacttgctttgacatcaacagggcaggtctatgcttggggctgtggagcttgtctaggttgtggttcttcagaagctactgctttgagacccaagcttattgaagaactggctgccacaagaatagttgatgtttctattggagacagtcattgtttggctctttctcatgataatgaagtttatgcctggggcaataactcaatggggcaatgtggtcagggaaattccacaggtcctattactaaaccaaagaaagtgagtggcttagatggcatagctattcagcagatttcggctggaacatcacatagtctggcatggactgctcttcctagggacagacaagttgttgcatggcaccgaccttattgtgtagatcttgaagagagtaccttctcacacctgcgttcttttcttgagagatactgtgataaaataaacagtgagattcccccactccctttcccttcatcaagagaacaccacagttttctcaagctgtgcctgaagctactttcaaatcaccttgctcttgcacttgcgggaggggtagctaccagcattctcgggaggcaggcaggtccacttcgaaatttgctcttcagactgatggactcaactgtcccagatgaaatccaagaggtggtaattgaaactttatcagtgggagcaaccatgctgttacctccattacgagaacggatggaattacttcattctcttttacctcaaggacctgatagatgggaaagcttatctaaaggacagagaatgcaactggatatcatcctgacaagtttgcaagatcatacccacgtagcctccctacttggctatagttcaccctctgatgctgctgacctatcttctgtgtgtactggctacggaaatctgtcagatcaaccttacggcactcagagctgccatccagatacccacctggctgaaattttgatgaagaccctcttaagaaatttaggattttatacagatcaagcatttggagagctagaaaagaatagtgataaatttctacttggaacatcatcatcagaaaacagtcagcctgctcatcttcatgaactgctatgttcactacagaaacagctgctggcattttgccatatcaataacattagtgagaactcaagcagtgtggcattgcttcataaacatcttcagcttttgttgcctcatgccacagatatttattcacgttctgcaaatttgctcaaagaaagtccttggaatggcagtgttggagaaaaattaagagatgtgatatacgtctcagctgctggcagtatgctctgccagattgttaactccctgctgttactccctgtgtcagtggctcggcctttattgagttacctcctcgacttgttgccacctcttgattgccttaatagactcctgccagctgctgatcttttagaagaccaggagttacagtggcctcttcatggagggccagaactaattgatcctgctggtctgccattacctcagccagctcagtcctgggtatggcttgtggatctagaaagaacaattgctctccttattgggcggtgtcttggtggcatgcttcagggctcccctgtgtctccagaggaacaggacactgcatattggatgaaaacgccactgttcagtgacggtgtagaaatggacactcctcaattggataaatgtatgagttgcctgttagaagtagcactttctggaaatgaagaacagaagccttttgattataaattgcggcctgaaattgctgtctatgtagacttggcattgggttgttctaaagagcctgcccgaagcctttggatcagcatgcaggactatgctgttagtaaagattgggacagtgcaactttaagtaatgagtcactcttggacactgtgtctagatttgttcttgcagctcttctgaaacacacaaatttacttagtcaagcatgtggagaaagccgatatcaacctggtaaacacttatcagaagtgtaccgttgtgtatacaaagttcgaagtcgtttacttgcttgcaagaaccttgaacttattcaaacaaggtcatcatcacgggacagatggatatcagaaaaccaggactctgcagatgttgatcctcaggagcattcatttactcgaactattgatgaagaagctgaaatggaagaacaggctgagagagaccgggaagaggggcatccggagccagaggatgaagaggaggaacgggaacatgaagtgatgacagctggcaaaatctttcagtgtttcctctcagcccgtgaagtagctcgtagccgagaccgagatagaatgaacagtggggcagggtctggggctcgagctgatgatccacctcctcagtctcagcaagagcgaagggtcagcacagaccttcctgagggtcaggatgtgtacactgctgcatgcaactccgtgatccatcggtgtgccctgttaatattaggagtaagtcctgtgatagatgagcttcagaagcgaagagaagaaggacagttgcagcaaccttcaacaagtgcctctgaagggggtggacttatgaccaggagtgaaagtcttactgcagagagccggctagtccacacaagcccaaattatagactgatcaaatcgaggagtgaatctgatttgtctcagcctgaatcagatgaagagggttacgcactgagtggcagacgaaatgttgatttggatttggcagcatctcacagaaagagaggtcctatgcacagtcaattggaatccctgagtgactcttgggctcgcctgaaacatagcagagactggttatgcaactcctcctattcctttgagtcagattttgatcttaccaagtctttgggagttcacactttgattgaaaatgttgtaagctttgtgagtggagatgtggggaatgccccaggttttaaagagccagaggaaagtatgtctacaagtccccaggcctccatcattgcaatggaacagcagcagttaagggcagaacttcgtttagaggcacttcatcagatcctcgttctattgtctgggatggaagaaaaaggtagcatctcactggcaggaagcagattgagttcaggcttccagtcctccacactactcacgtctgtgaggctgcagttcctagcagggtgttttggtttaggcactgttggacacacaggaggcaagggagagagtggccgattgcatcactatcaggatgggatcagagcagctaagagaaatattcagattgaaatccaggtagctgtgcataaaatttatcaacagttgtctgctaccctggaaagagccctgcaagcaaacaagcatcacattgaagcccagcaacgtctgcttctggttacagtttttgccctaagtgttcattatcaaccagtagatgtttctttggcaatttccactggtctgctaaacgtattgtcacagttgtgtggtacagacaccatgctaggacagcccctgcagttgttgccaaagacgggtgtttcccagcttagcacagctttgaaagtggccagtacaaggttgctccagattctagccatcactactgggacctatgctgataaactgagtcccaaagtagttcaatccttgttggatctactctgtagtcagttgaagaatttattgtcccaaactggtgtactacatatggcctctttcggagaaggggagcaagaagacggtgaagaagaagaaaaaaaagttgactccagtggagaaactgagaagaaagatttcagagctgctcttaggaaacaacatgcagccgaactccatctaggggattttttagtttttcttcgcagagttgtatcttcaaaagcaattcaatcaaaaatggcttccccaaagtggaccgaagtgcttctaaatatagcatctcagaaatgttcttcaggtatccctctggttggtaacttaagaacaaggctccttgcacttcatgtccttgaagctgtgctgccagcttgtgaatctggtgtagaagatgatcaaatggcccagattgttgagcgcttattttcccttctctctgattgtatgtgggagacacccattgctcaggccaaacatgctattcagataaaggaaaaagaacaagaaataaaactacagaagcagggcgagttggaagaagaagatgagaatcttcctatccaagaagtatcctttgacccggagaaagctcagtgttgcctagtggagaatggacagattttaactcacggcagtggagggaaaggatatggattggcatctacaggagtaacttctgggtgctatcagtggaagttttatattgtgaaggaaaacagaggtaatgaaggcacgtgtgttggagtttctcgctggccagtacatgactttaatcaccgcactacctcggatatgtggctctatagggcctacagtggtaacctctatcacaatggagaacagactctcacattgtccagctttactcaaggagatttcattacctgtgtgttagacatggaagccaggaccatttcttttgggaaaaatggagaggaacccaaattagcttttgaagatgtggatgcagcagagttgtacccatgtgtgatgttctatagtagcaatccaggggaaaaggtgaaaatttgtgatatgcagatgcgtggcacaccccgagacttacttccaggagaccctatttgtagtccagtagcagcagtgctggctgaggccactattcagctcatccgtatccttcaccgaacagaccgttggacttactgcattaacaaaaaaatgatggaaaggcttcacaaaattaagatatgtattaaagagtcaggtcagaagctaaagaaaagccgctcggttcagagccgagaggaaaatgaaatgagagaggagaaggagagcaaagaggaagagaaaggtaaacatactaggcatggcctcgctgacctctcagagctgcagctgaggactctttgcatagaggtgtggcccgtgctggctgtgataggaggagttgatgctggtcttagagttggaggtcggtgtgttcacaagcaaactgggcgccatgccacgctgctgggagtggtcaaagagggcagcacgtctgccaaggtccaatgggatgaagcagaaattactatcagcttcccaactttttggtcgcctagtgatactccattgtataatctggaaccctgtgaaccattgccgtttgatgtggcgcgattccgaggcctgacggcttctgtgctgctggacctaacatatctcactggcgttcatgaagacatgggcaaacagagcaccaaacgacatgaaaagaaacaccgacatgaatccgaggagaaaggggatgttgagcagaaacctgagagtgaatccgctttagatatgcgaacaggcctaacatctgatgacgtcaaaagtcagagtaccacaagctccaaatcagaaaatgaaatcgcttcattttctttagatccaacactgccaagtgtggaatcccaacatcaaataacagaagggaaaagaaaaaatcatgaacacatgtccaaaaaccatgatgtagcccagtcagaaatcagagcagtccagctgtcctatctttacctcggtgctatgaagtcacttagtgcccttcttggctgtagtaaatatgctgagctgttgctgataccaaaagttctggctgaaaatggccacaactcagactgtgcaagttctccagttgttcatgaagacgtggagatgcgagcagccctgcagttcttgatgcgacacatggtgaagcgagcagtcatgcggtcacccataaagagagcattgggattagctgatctggaacgagcgcaagccatgatctataaattagtggttcatgggcttttggaagaccagtttgggggcaaaattaagcaagagattgatcaacaagctgaagaaagtgaccctgcccagcaggcacagacaccagttactactagcccatcagcctcaagcacgacctcctttatgagcagctctctggaggacaccacaactgccaccactccagtcactgacacagaaacagtgcctgcatccgagtccccgggagtgatgcctcttagtcttctcaggcaaatgttctctagttacccaactaccactgtacttcccacacgtcgggcacagactcctccaatatcttcgttaccaacctctccttctgatgaagtaggaaggaggcaaagtttaacttctcctgattcccagtcagcaaggccagctaaccgcacagccttgtcagacccaagcagtagactttcaacttctcctcctcctccagcaattgcagttcccttgctggaaatggggttctctcttcggcagattgccaaagccatggaagctacaggtgctaggggagaggctgatgcccagaatatcactgtccttgccatgtggatgatagagcaccctgggcatgaggatgaagaggagccccagtcgggcagcacagcagactctaggcctggagcagccgttctaggcagtggcgggaagtcaaatgatccctgttatttgcagtcacctggagacataccatcagctgatgctgctgaaatggaggaaggttttagtgaaagccctgataatttggatcatacagagaatgcagcttctggaagtggaccatcagctagaggtcgctcagcggtaacaagaagacacaagtttgacttagctgctcgcacactgctagcaagagcagcgggattataccgctctgtgcaggcccacaggaatcaaagtcggagagaaggaatatctttgcagcaagacccaggggcgttgtatgactttaatttagatgaggaattggaaattgatcttgatgatgaggcgatggaagctatgtttggacaagacctgaccagtgacaatgatattctgggaatgtggatcccagaggtactggattggcctacctggcatgtttgtgagtctgaagacagggaagaagtggtggtgtgtgaactgtgtgaatgcagcgtcgtcagcttcaatcagcacatgaagagaaaccatccaggctgtgggcgcagtgcaaaccgccagggctatcgcagcaatggttcctatgtggatggctggtttggcggtgaatgtgggagtggaaatccgtactacctgttatgtggcacctgcagggagaagtacttagccatgaagaccaaatctaagtcaacaagttctgaaaggtacaagggacaagctccagatctaattggcaagcaagacagtgtgtatgaagaagactgggacatgttggatgttgatgaagatgaaaagctaactggtgaagaagaatttgaattacttgctggaccgcttggtttaaatgaccggcgcattgtaccagaaccagttcagttccctgacagcgatccactgggagcatcagtagcaatggtcacagccaccaacagtatggaagagactctgatgcaaataggttgccatggctccgtagaaaagagctcctctgggagaataacgttaggagagcaggcagctgccctagcaaaccctcatgaccgtgtggtggctttaaggagagtgactgctgctgctcaggttcttctggccagaaccatggtcatgagagcgctgtctcttctctcagtcagtggttccagttgtagcctggctgctggtcttgagtctctggggctaacagatatccgaacgctagttcgattaatgtgcttggcagcagcagggagagctggcctctccaccagcccttctgccatggctagcacctcagaacgatcacgaggtgggcatagcaaggctaacaagcctatctcttgcctggcctatttgagcacagcagtgggatgtctggcatcaaatgctcctagtgctgccaaactgcttgtacagttgtgtacacagaacttgatttctgctgcaacaggtgtaaatctaaccacagttgatgactcaattcagcgaaagtttctacccagctttctccgaggaattgctgaagagaacaagcttgtgacctccccaaactttgttgtaacacaggcccttgtggcattgctagcagacaaaggggccaaactaagacctaactatgataagtcagaagttgaaaagaaaggccctctggagttggctaatgccctggcagcctgctgcctctcctccaggctgtcctcacagcatcggcaatgggcagctcagcaactcgtgcgcactcttgctgcacacgaccgtgacaaccaaactactctgcagacacttgctgatatgggaggagatcttagaaaatgctcctttatcaaattggaggctcatcagaacagagtaatgacatgtgtttggtgtaataaaaaaggtcttttggctacaagtggcaatgatggcaccatccgcgtatggaatgttaccaagaagcaatattcactgcaacagacctgtgtgttcaacagattggaaggggatgctgaggaaagcctgggatcacccagtgatccaagtttctcaccagtttcctggagtatcagtggcaaatatctagcaggcgctttggaaaagatggtgaatatctggcaagttaatggaggaaaaggattagtagatattcagcctcattgggtatctgccctggcttggccagaagagggtccggctacagcctggtcaggagagtctccagaattgttgttggtgggacggatggatggatctctgggactgattgaagttgttgatgtgtccaccatgcaccgtcgagaattggagcattgctatcgaaaggatgtgtctgttacttgcattgcatggttcagtgaagacagaccatttgcagtgggatattttgatggaaaactgttactgggaacaaaggaaccacttgagaaaggaggcattgttctaattgatgcacataaggatactcttattagcatgaagtgggaccctacaggtcatattcttatgacatgtgccaaagaagacagtgtgaaactctggggctctatttcgggatgctggtgctgtctacattcactctgccatccatctattgtaaatggcattgcttggtgccgccttccagggaaaggatccaagttgcagttactgatggctactggctgtcagagtggcttagtatgtgtttggcgcattcctcaagatactacacagaccaatgtgactagtgcagaaggatggtgggagcaggaatcaaattgccaggatggatataggaaatcatcaggagccaagtgtgtttatcagctgcggggacacatcactcctgttcggactgttgcctttagttctgatgggttggccctggtgtctggtggactaggtgggctcatgaacatttggtctttaagggatggctctgtcttgcaaactgttgtgataggctctggagctattcagaccacagtatggattccagaagttggagtagctgcttgctcaaatagatcaaaggatgttttggtcgtgaattgtacagcagaatgggcagctgccaatcatgttttggcaacctgtaggacagcattgaaacagcagggtgttctgggattgaacatggctccctgcatgagagcatttttggagcggctccccatgatgcttcaggagcagtatgcctatgaaaagcctcatgtggtttgtggtgaccaacttgttcatagcccctatatgcaatgcttggcttcccttgctgtgggacttcatctggatcagctgttgtgtaaccctccagtgccaccacaccaccagaactgtctccctgaccctgcatcctggaatccaaatgaatgggcctggttagaatgtttctcaaccactataaaagctgccgaagccctgaccaatggagcccagtttccagaatcttttaccgttccagatctagaacctgttccagaggatgaacttgtatttctaatggataacagtaaatggattaacggcatggatgaacaaattatgtcttgggcaacttccagacctgaggactggcacctgggaggtaaatgtgatgtctacttatggggtgctggtaggcatggacagctggcagaagctggaagaaatgtaatggtacctgcagcagctccctcattctcacaggcccaacaggtcatttgtggtcagaattgtacctttgtcatccaggccaatggcacagtgttggcttgtggggaaggaagttatggcagattaggacaaggaaattcagatgaccttcatgtgctgacagttatttcagccttacaaggctttgtggtgacccagctggtgacttcctgtggttctgatgggcactctatggccctaactgaaagtggtgaggtctttagctggggagatggtgactatggtaaacttggccatgggaacagcgacaggcagcggcggcccaggcagatcgaggccttacaaggagaagaagtggtgcagatgtcttgtggcttcaagcactcagcagtggtcacttcagatggcaaactgttcacctttgggaatggtgactatggtcgtctgggtcttggaaatacctctaacaaaaaacttccagagagagtgactgcactggagggatatcagattggacaggtggcctgtggattaaaccacactttggcagtgtcagcagatggttccatggtgtgggcttttggagatggagactatggaaaactaggcttaggaaattccactgcaaaatcttcacctcagaaaattgacgtcctttgtggaattggaataaaaaaggttgcttgtggaactcagttttctgttgctttgaccaaagatggtcatgtgtatacctttggtcaagatcgcctgataggcttgccagaggggcgtgctcgcaatcacaatcgaccgcaacaaatccctgtcctggctggagtaatcatagaagatgtggcagttggagctgaacacacacttgctttggcatcaaatggagatgtgtatgcctgggggagcaattcagaagggcagctcggcttaggccataccaaccatgttcgagaaccaaccctggtaacaggtctgcaagggaaaaatgttcggcagatctcggctggccgctgccacagtgctgcatggacagcaccacctgtcccaccaagagcaccaggtgtgtcagtacctctgcagctgggcctgcctgacacagtgcccccccagtatggggcgctgagagaagtcagcattcacacggtgcgggccaggctccggctgctctaccacttctctgacctcatgtactcatcctggagactgctgaaccttagccccaacaaccagaacagcacatcccattataatgctggaacttggggcattgtacagggacaacttcggcctttgttagccccaagagtctacactctgccaatggtgcgctccataggaaaaaccatggttcaaggcaaaaactatggacctcagataactgtaaagaggatatcaaccagaggacggaagtgtaagcctatttttgtccaaatagcgagacaagtagttaagctgaatgcttcagacctccgcctgccttcccgagcgtggaaggttaagctggttggagaaggggctgatgatgctggaggagtgtttgatgacaccatcacagagatgtgccaggaacttgaaactggtattgttgaccttcttataccctctcccaatgccaccgcagaagtgggttacaatagggacaggttcctttttaacccttctgcctgcctcgatgaacacttaatgcagtttaagtttttaggaattttaatgggggttgccattcgcacaaagaagcctctggacctccacttggcccctctggtgtggaagcagctgtgctgtgtcccactcaccctagaggacctggaggaggtggatctgctctacgtgcagactctcaacagcattcttcacattgaagacagtgggattaccgaggagagtttccatgagatgattcctcttgattcttttgttggccagagtgctgatggcaaaatggttcctataatccctggtggaaatagtatcccactcacattttccaacaggaaggaatatgtggagagggccattgaatatcgacttcatgagatggacagacaggtggctgcagtccgagaagggatgtcctggattgttcctgtgccgctgctgtccctcctcacagcaaaacaactggagcagatggtgtgtgggatgcccgagatctctgtggaagtcttgaagaaagtggtgcggtaccgtgaggtggatgagcagcatcagctggtgcagtggttctggcacacgctggaagagttctccaatgaggagcgggtgcttttcatgaggtttgtgtcaggaagatctcgactaccagccaacactgctgacatttctcagagatttcaaatcatgaaggttgataggccttacgacagtctgcctacctcacagacctgcttcttccagctgaggctgcccccgtactccagccagctggtcatggccgagcgcctgcgctatgccatcaacaactgccgctcaatcgacatggacaactacatgctctcgagaaacgtggacaacgccgagggctccgacactgactactgaccgtgcgggtgctctcaccctcccttctctccctcaataatgctcacttctgatttgatgttgatatacttttatggtaactacatagatgttataagaacataaaccaacattataaacaatggccacatttagttactctaaatgtaacaaagaaattagatgtttttatttttctgtgattgtacaaaaacaacaaaaacgaagtgctctcagtcaggtttttccctccatatttttggtcacttttgataagtttgcatgaaaccattttggtgcatttttagttgggaatggtacatttttgtaaatccacccagtgaacatgaaattgtacattgtgtataattgttcattagaaaggacagttttacatgaatattcatatatttattttgttttaatttgaattgcctgttcagggttccttatgcagagaaataaagcagattcaggaattggaaaaaaaaaaaaaaaaaaaa

SEQ ID NO: 1821 - DNA, 3885 bp, HOMO SAPIENS
aggccggggcggggctgggaagtagtcgggcggggttgtgagacgccgcgctcagcttccatcgctgggcggtcaacaagtgcgggcctggctcagcgcgggggggcgcggagaccgcgaggcgaccgggagcggctgggttcccggctgcgcgcccttcggccaggccgggagccgcgccagtcggagcccccggcccagcgtggtccgcctccctctcggcgtccacctgcccggagtactgccagcgggcatgaccgacccaccaggggcgccgccgccggcgctcgcaggccgcggatgaagaagaaaacccggcgccgctcgacccggagcgaggagttgacccggagcgaggagttgaccctgagtgaggaagcgacctggagtgaagaggcgacccagagtgaggaggcgacccagggcgaagagatgaatcggagccaggaggtgacccgggacgaggagtcgacccggagcgaggaggtgaccagggaggaaatggcggcagctgggctcaccgtgactgtcacccacagcaatgagaagcacgaccttcatgttacctcccagcagggcagcagtgaaccagttgtccaagacctggcccaggttgttgaagaggtcataggggttccacagtcttttcagaaactcatatttaagggaaaatctctgaaggaaatggaaacaccgttgtcagcacttggaatacaagatggttgccgggtcatgttaattgggaaaaagaacagtccacaggaagaggttgaactaaagaagttgaaacatttggagaagtctgtggagaagatagctgaccagctggaagagttgaataaagagcttactggaatccagcagggttttctgcccaaggatttgcaagctgaagctctctgcaaacttgataggagagtaaaagccacaatagagcagtttatgaagatcttggaggagattgacacactgatcctgccagaaaatttcaaagacagtagattgaaaaggaaaggcttggtaaaaaaggttcaggcattcctagccgagtgtgacacagtggagcagaacatctgccaggagactgagcggctgcagtctacaaactttgccctggccgagtgaggtgtagcagaaaaaggctgtgctgccctgaagaatggcgccaccagctctgccgtctctggagcggaatttacctgatttcttcagggctgctgggggcaactggccatttgccaattttcctactctcacactggttctcaatgaaaaatagtgtctttgtgattttgagtaaagctcctatctgttttctccttctgtctctgtggttgtactgtccagcaatccaccttttctggagagggccacctctgcccaaattttcccagctgtttggacctctgggtgctttctttgggctggtgagagctctaatttgccttgggccagtttcaggtttataggccccctcagtcttcagatacatgagggcttctttgctcttgtgatcgtgtagtcccatagctgtaaaaccagaatcaccaggaggttgcacctagtcaggaatattgggaatggcctagaacaaggtgtttggcacataagtagaccacttatccctcattgtgacctaattccagagcatctggctgggttgttgggttctagactttgtcctcacctcccagtgaccctgactagccacaggccatgagataccagggggccgttccttggatggagcctgtggttgatgcaaggcttccttgtccccaagcaagtcttcagaaggttagaacccagtgttgactgagtctgtgcttgaaaccaggccagagccatggattaggaagggcaaagagaaggcaccagaatgagtaaagcaggcaggtggtgaagccaaccataaacttctcaggagtgacatgtgcttccttcaaaggcatttttgttaaccatatccttctgagttctatgtttccttcacagctgttctatccattttgtggactgtcccccacccccaccccatcattgtttttaaaaaattaaggcctggcgcagcagctcatgcctataatcccagcactttgggaggctgaggcgggcggatcacttgaggccaggagtttgagaccagcccaggcaacatagcaaaaccccattctgctttaaaaaaaaaaaaaaaaaaaattagcttggcgtagtggcatgtgcctataatcccagctactggggaggctgaggcacaagaatcatttgaacctgggaggtagaggttgctgtgagccgagattacgcccctgcactccagcctgggtcacagagtgagactccatctcagaaaaaaaaaaaattgagtcaggtgcagtagctccttcctgtagtcccagctacttgggaggctgaggctagaggatcacttgagcccaggagtttgagtctagtctgggcaacatagcaagaccccatctctaaaatttaagtaagtaaaagtagataaataaaaagaaaaaaaaactgtttatgtgctcatcataaagtagaagagtggtttgcttttttttttttttttggattaatgaggaaatcattctgtggctctagtcataatttatgcttaataacattgatagtagccctttgcgctataactctacctaaagactcacatcatttggcagagagagagtcgttgaagtcccaggaattcaggactgggcaggttaagacctcagacaaggtagtagaggtagacttgtggacaaggctcgggtcccagcccaccgcaccccaactttaatcagagtggttcactattgatctatttttgtgtgatagctgtgtggcgtgggccacaacatttaatgagaagttactgtgcaccaaactgccgaacaccattctaaactattcatatatattagtcatttaattcttacataacttgagaggtagacagatatccttattttagagatgaggaaaccaagagaacttaggtcattagcgcaaggttgtagagtaagcggcaaagccaagacacaaagctgggtggtttggtttcagagccagtgcttttcccctctactgtactgcctctcaaccaacacagggttgcacaggcccattctctgatttttttcctcttgtcctctgcctctccctctagctcccacttcctctctgctctagttcattttctttagagcagcccgagtgatcatgaagtgcaaatcttgccatgtcagtcccctgcttagaaccctccaatggctcactttctctttaggcaaaagtctttaccccatgccttctcccatctcatctcaaccccctcatttgttggctgtctgctgtcagccactcttctttcaggtcctcagatgcactgcaccctctcctgcctgggggtctttgctcctgctactacctctgcttgaacagctcctcaccttccttcctccaaccctacccttgtataggtgacttttgttcatccttcagaattcaactcacatgtctcttgcatggagaaccctcacctactgtgttgagaccctgtccagcccccaggtgggatcctctctcgacttcccatacatttctttcacagcatttacatagtccatgatagtttacttgtgggattatttggttaatctttgcctttaacaccagggttccttgggtgaaggagcttctttatcttggtaacagcattatttcaagcataacttgtaatatagttatattacatatataacatatatatatataacataacatatataacatatataacaagcataacttgttatatagtcttgtatatagtaagacctcaataaatatttggagaacaaaaaaaaaaaaaaa

SEQ ID NO: 1822 - DNA, 7154 bp, HOMO SAPIENS
gcgcagaggcgtcacgcactccatggtaacgacgctcggcccgaagatggcggccgaatggggcggaggagtgggttactcgggctcaggcccgggccggagccggtggcgctggagcgggtctgtgtgggtccgaagcgttttactcctgttgggcgggctccgggccagcgccacatctactcccgtctccttgggcagttcccctccctgccggcaccacgtcccctctgacactgaggtcataaataaagttcatcttaaggcaaatcatgtggtcaagagagatgttgatgagcatttaagaatcaagactgtctatgataaaagtgttgaagagttgctccctgagaaaaagaatcttgtaaagaacaagcttttcccacaagcgatttcttatttagagaagacttttcaggtccgtcgacctgcgggcactatcttacttagcagacaatgtgcaacaaaccaatacctccggaaggaaaacgatcctcacaggtactgcaccggggagtgtgccgcacacacaaagtgcggccccgttattgttcctgaggaacatctccagcaatgccgggtctaccgtgggggtaagtggcctcatggagcagtgggtgtgccagaccaagaaggcatctcagatgcagactttgttctttacgttggtgctctggccaccgagagatgcagccatgaaaacatcatctcttatgcagcctattgtcagcaggaagcaaacatggacaggccaatagcaggatatgctaacctgtgtccaaatatgatctctacccagcctcaggagtttgttgggatgctgtccacagtgaaacatgaggttattcatgccctgggtttctctgctgggctgtttgcattctaccatgataaagatggaaatcctctcacttcaagatttgcagatggcctcccaccttttaattatagtctgggattatatcaatggagtgataaagtagttcgaaaagtggagagattatgggatgttcgagataataagatagttcgtcacactgtgtatctcctggtaacgcctcgtgttgttgaggaagcacgaaaacattttgattgtccagttctagagggaatggaacttgaaaatcaaggtggtgtgggcactgagctcaaccattgggaaaaaaggttattagagaatgaagcgatgactggttctcacactcagaatcgagtactctctcgaatcactctggcattaatggaggacactggctggtataaagcaaattacagcatggctgagaagttagactggggccgaggaatgggctgtgactttgtcaggaagagctgtaaattctggattgatcagcagagacaaaagagacagatgctgagcccttactgtgacacgctcagaagtaacccactgcagctaacttgcagacaggaccagagagcagttgccgtgtgtaatttgcagaagttccctaagcctttaccacaggaataccagtactttgatgaactcagtggaatacctgcagaagatttgccttattatggtggctccgtggaaattgctgactactgccctttcagtcaggaattcagttggcatttaagtggtgaatatcagcgcagctcagattgtagaatattggaaaatcaaccagaaatttttaagaactatggcgctgaaaagtatggacctcattccgtttgtctaattcagaaatcagcattcgttatggagaagtgtgagaggaagctgagttacccagactggggaagcggatgctatcaggtttcttgttctcctcaaggtctgaaagtttgggtccaagatacttcatatttgtgtagtcgggctgggcaggtcctccctgtcagtatccagatgaatggctggattcacgatggaaacctgctctgcccatcatgttgggacttctgtgagctctgtcctccagaaacagatcctccagccactaacctgacccgagctctgccacttgatctttgttcctgttcctcgagcctggtggtcaccctctggcttctgctaggcaatctgtttcctctgctggctggatttcttctgtgtatatggcactaggaatggaaaagtggatcttcaagatattcttttatgttatgttcttgtgaacaaagcacaaagtttgagtgagtgccaacctatgcagatggtagaagtggcattcctggctttggcttggaagaattgacgaccatcagaccttgaagcagaacttcacagcagcctgtcctcatcagcaacccaaccaccttcatcagcaacccaaccaccttcatcagcaacccaaccacctcgtcagcaacccaaccacctcgtcagcaacccaaccacctcgtcagcaacccagccaccttcatcagcaacccaaccacctcatcagcaacccagccaccttcatcagcaacccaaccacctcatcagcaaaccaaccactttcatctgcaacccaaccactttcatcagcaactcaacaccttcatctgcaacccaaccaccttcatcagcaaaccaaccaccttcttcagcaacccaaccacctcatcttggagaaggagaaggaactgcaagccaccaagtcttcatttttcagggtttgtaatcttcccaaagttttcctttgaaaataggataatgggtggaattttcagagtgattacatacctcaacatttttattaacatacaacaatgggaaagttcatcatccatatactgcagtcacttaaacaacagccaattattgcaagattagaattggagatcttgtcctcaaaagtataaattgtcctttgagttatagaaaataatggaattgggatttctacatatcattattatacctattttaaatttaatggcagccaggcatggttccagctacttgggaggctgaggcaggaggatcgcttgagcccaggagttcaaggctgcagtgagctatgattgcaccactgtattccagcctgcacgatagagttagaccctgtatcttaaaaaaaaaaaaattaatggctggtatatagtaaacttaattcactgttcccattgttctaaagaatttttttaaataatgtttcattaaatcttatgatttaaccgtgcttgccctttttgccagctatgtggcagtttacggcagaactgctgtcagtgtgctggtagccctctattcatccctcctcagagcccagcttccagaactgctatcactgtgctggtagccctctgtattcatccctcttcagagctcagcttctggttgtattctccatgagtttaataatgacatgaaaaaatgtggaagccgagagagtaaaatactctgccctgtaaaaacatggaagacatgcaaacagaaaaaaaataattgtattgttttagataatacttaagacaactgtgaaacaacaaaaacacaactattcctttgtgaccgatgaagataaaaagaaattctggtaaagacgggtatgcagttttttaaaatgggttaagaaattgttgcagaagaatttctaacatctgaaaatggttttatgtttaagaaggatggtctgaattgtgtactaatagcaaggtataagtttggtgtagagcctatccagtagcgtccactgtaccacttttaagtaagactcagtccacagaagctggaagattgccttcgctttaaatatcctttaccttctgcatttgacactcctcctgttactacatagattccggtccccagaagcaattttacactggtactagagcttaccagccccatttagtaatttttaatggctagatgaggtttaacaagaatatgaaaagaaaaaagaaaaaatatattcatgaatgataggcgatgcccattctttctctcaagctaatgaagtcctatggcattctaaccacaaccctcggacagactcctcctattcctccatggcattgtaaccacaaccctcggacagactcctcctattcctccatggcattgtaaccacaaccctcggacagactcctcctactcctccatggcattgtaaccacaaccctcggacagactcctcctactcctccatggcattgtaaccacaaccctcggacagactcctcctactcctccatggcattgtaaccacaaccctcggacagactcctcctattcctccatggcattgtaaccacaaccctcggacagactcctcctattcctccatggcattgtaaccacaaccctcggacagactcctcctattcctccatggcattgtaaccacaaccctcggacagactcctattcctccatggcattgtaaccacaaccctcggacagactcctcctattcctccatggcattgtaaccacaaccctcggacagactccttctgttcctcctttcctcgtccttccctgcttttcgtccattcagcatatagctattcagtactccattgaagaaattatgctaagtgagcaaagcaacataattactaagaattaattctgattatttggcactagagccaacagcaaccccagcacagaggaaagtcgcttttttttcaaatgcataaatttaaagtatgtatttgcatgcagttttaaatgggaggtatttgtcattgtgaaaagctgggaatctcaaacatagtcaacttaactaaaaagaagctaatacaggttgagcattcctaatccaaaaatccagaatccaaattgctccaaaatctgaaactttctgaatgctgacctgatactacaagtagaaaattccacatacaagtacttaacacaaactttgtttcatgcacaaactactaaaaatattgtataaaattaccttcaggcagtgtgtgtagttatatatgaaacatgaatttcatgtttagacttgggtccatgcccaagatacctcattaggtatctgtaaatatccgaaatccaaaaaaaagtctgaaatctgaaacacttctggtcccaagcatttcagtaagtgatgctcaacctgcgtaatggtctgcgggccagtgctcattttctgcctatgttgtacatactttaaattgtgtaaattaaaagtcaaagcaaagagtctatttttaaagaaacttacaataatctaaacatatacttcttatgattatgaatcatcctgcaaagctgaatgaagaattttaccaaaaatacaatgaattaatcatatatttgagagtcacagtgataggttcgactatattttgactgttgtgtagtggcaccgtttaggtagtattgtttctgagcatggtgctttttatacttgaaatatatttttgctttattttttattgatataattatatttgcactaatggctttctgaagaaaatattatagatgacattttttgtatatatatttattaagcttgggaacctggtcgcccagtgttttctctggacaaatgtgaaactggataaagtatggataaagtcttgagttcctcagggtaactgtgttgatgtctcccgtcctcttcagtaaggcttgaatatgattttactcatcattgattctgcatagtgtacccagcaagacttagaaggacactgaacctgtcagagattttaagaggcacattttagtcactttgaatatggtagtggtgggcgcggtgactgaagcctgtaatctcagcacttcgggaggccaaggcaagcagatcacgagatcaggagtttgaggttacagtgagctgatcgcaccactgcactgcagcctggatgacagagtgagactttcttgggaaaaaaaaaaatgacagtgaagcagacttttagaatccgagatgtcattgcagaattattggtataaaattcagctgcaaagtgaagaaattgaaatggcccacacgttgatatcctgtggcaggttatacccttcatgttagcaaagacgaagccacgtcgctgtgttaagagggacaggctgggccggctgcagctgtagtggaagtgagggacacagggaaggaatggggagcagcaatttggggacagtagactggagtcactttctgactcaaaaagggtcaagtacttattaaaaactatcttggttttctgttcagacttaggctcattttgatcattttaaggtcccagttgtcaaaaatatcaagtgaatttgtctcaggttttcagaaacaaaatttacaggaaggaagcaaaagccatgtcagtagccttgagctgacagctttaaagaaactggcaaacaggtaggttgtcctcatatagatccttccagtattctgaaaaacatccttttatttcttaaaaccagtaacccttacatttttcctataggatagttatttttgttgagatcaaatagacattctataaatgttataaattatgcttgcagttactcagcctatctaggcttaaggtttatcaatatttgaagttgaaacatcatcttatgaggtttagttttaggaagataaataaatatatcaaagtatttcataaagttgtatcaatgttccttctaacattagaagacttactgactgaggccatctgtgaacgactaggtgatctcagaatccttccagctctaataccctctgactaacactcacccagaattgctgtctgtgctggctgtgatctgcctccaggagcatacgccatcctgcgtgctgtgtccatcacagtgtctgtgctcggtgccttaccactgtccgtgtccttggacgctgactggacagagaggagcctgtctctcagggcacatgagtcgtcgtggcaggaggagacgggcctcagtcacagtgtcacagacccttgtcacagtggacactagtcattcctgccatgtccttgcagcccaggaggactaaaaagattttaatgaagtctgtgttactcattctgaagaaaagaacttacctgagaggagtaatatttttttaatatatattgggtcagggacagggatggagtggttgttttatgtttacatttttaataagtaaaatagaagatttaagaactaatatttatggtattgaactttaagtgtgatatattccttagaaaaacacaactttaataaaaatggaaactaa

SEQ ID NO: 1823 - DNA, 5305 bp, HOMO SAPIENS
tccttcctttccgtctctggccggctgggcgcgggcgactgctggcgaggcgcgtgggaccttacgctggttccccttcgtctcctctcccggcccgggccactagagagttcgctgacgccgggtgagctgagcctgccgccaagatgccggcctattttcagaggccggaaaatgccctcaaacgcgccaacgaatttcttgaggttggcaaaaagcagcctgctctggatgttctttatgatgttatgaaaagtaaaaaacatagaacatggcaaaagatacacgaaccaattatgttgaaatacttggaactttgcgtggatcttcgcaagagccacttggcaaaggaggggttataccagtataagaacatttgtcaacaggtgaacataaaatctctggaggatgttgttagggcatatttgaaaatggcagaggaaaaaactgaagctgctaaagaagaatctcagcagatggtcttagatatagaggatctagataatattcaaactcctgagagtgttctcctaagtgctgtaagtggtgaagacactcaggatcgtactgacagattacttttaactccatgggttaaattcctgtgggagtcttacaggcagtgtttggaccttcttagaaacaattctagagtagagcgcctgtaccatgatattgcccagcaagctttcaaattctgcctccaatacacgcgtaaggctgaattccgtaaactgtgtgacaatttgagaatgcacttatcgcagattcagcgccaccataaccaaagtacggcaatcaatcttaataatccagagagccagtccatgcatttggaaaccagacttgttcagctggacagtgctatcagcatggaattgtggcaggaagcattcaaagctgtggaagatattcacgggctattctccttgtctaaaaaaccacctaaacctcagttgatggcaaattactataacaaagtctcaactgtgttttggaaatctggaaatgctctttttcatgcatctacactccatcgtctttaccatctctctagagaaatgagaaagaatctcacacaagatgagatgcaaagaatgtctactagagtccttttagccactctttccatccctattactcctgagcgtacggatattgctcgacttctggatatggatggcattatagttgaaaaacagcgtcgccttgcaacactactaggtcttcaagccccaccgacacgaattggccttattaatgatatggtcagatttaatgtactacaatatgttgtcccagaagtgaaagacctttacaattggcttgaagtagaatttaacccattaaaactctgtgagcgagtcacaaaggttctaaattgggttagggaacaacctgaaaaggaaccggaattgcagcagtatgtgccacaactgcaaaacaacaccatcctccgccttctgcagcaggtgtcacagatttatcagagcattgagttttctcgtttgacttctttggttccttttgttgatgctttccaactggaacgggccatagtagatgcagccaggcattgcgacttgcaggttcgtattgatcacacttctcggaccctgagttttggatctgatttgaattatgctactcgagaagatgctccgattggtcctcatttgcaaagcatgccttcagagcagataagaaaccagctgacagccatgtcctcagtacttgcaaaagcacttgaagtcattaaaccagctcatatactgcaagagaaagaagaacagcatcagttggctgtcactgcataccttaaaaattcacgaaaagagcaccagcggatcctggctcgccgccagacaattgaggagagaaaagagcgccttgagagtctgaatattcagcgtgagaaagaagaattggaacagagggaagctgaactccagaaagtgcggaaggctgaggaagagaggctgcgccaggaagcaaaggagagagagaaggagcgtatcttacaggaacatgaacaaatcaaaaagaaaactgtccgagagcgtttggagcagatcaagaaaacagaactgggtgccaaagcattcaaagatattgatattgaagaccttgaggaattggatccagattttatcatggctaaacaggttgaacaactggagaaagaaaagaaagaacttcaagaacgcctaaagaatcaagaaaagaagattgactattttgaaagagccaaacgtttggaagaaattcctttgataaagagcgcttacgaggaacagagaattaaagacatggatctgtgggagcaacaagaggaagaaagaattactacaatgcagctagaacgtgaaaaggctcttgaacataagaatcgaatgtcacgaatgcttgaagacagagatttattcgtaatgcgactcaaagctgcacggcagtctgtttatgaggaaaaacttaaacagtttgaagagcgattagcagaagaaaggcataatcgattggaagaacggaaaaggcagcgtaaagaagaacgcaggataacatactatagagaaaaagaagaggaggagcagagaagggcagaagaacaaatgctaaaagagcgggaagagagagagcgcgccgaacgagcaaaacgcgaggaagagctacgagagtatcaggagcgggtgaagaaattagaagaagtggaaaggaaaaaacgccaaagggagttggaaattgaagaacgagaacggcgtagagaggaagagagaagacttggcgatagttccctttctagaaaggactctcgttggggagatagagattcagaaggcacctggagaaaaggacctgaagcagattctgagtggagaagaggcccgccagagaaggagtggagacgtggagaagggcgagatgaggacaggtctcatagaagagatgaagagcggccccggcgtctgggggatgatgaagatagagagccctctcttagaccagacgatgatcgggttccccggcgtggcatggatgatgacagaggccctagacgtggtcctgaggaagataggttctctcgtcgtggggcagacgatgaccggccttcctggcgtaacacagatgatgacaggcctcccagacgaattgccgatgaagacaggggaaactggcgtcatgcggatgatgacagaccacctagacgaggactggatgaggacagaggaagctggcgaacagctgatgaggacagaggaccaagacgtgggatggatgatgaccgggggccgaggcgaggaggcgctgatgatgagcgatcatcctggcgtaatgctgatgatgaccggggtcccaggcgagggttggatgatgatcggggtcccaggcgaggcatggatgatgaccggggtcccaggcgaggcatggatgatgaccggggtcccaggcgaggcatggatgatgaccggggtcccaggcgagggttggatgatgatcgaggaccttggaggaacgccgatgatgacagaattcccaggcgtggtgcagaggatgacaggggcccttggagaaacatggatgatgatcgcctttcaagacgtgctgatgatgatcggtttcccagacggggtgatgactcaagacctggtccttggagaccattagtcaagccaggtggatggagagagaaagaaaaagccagagaggagagctggggtccacctcgagaatcaaggccatcagaagaacgtgaatgggacagagaaaaagaaagggacagagataatcaagatcgggaggagaatgacaaggaccctgagagagaaagggacagagagagagatgtggatcgagaggatcgcttcagaagacctagggatgaaggtggctggagaagaggaccagctgaggaatcttcaagctggagagactcaagtcgccgggacgatagggatagggatgaccgtcgccgtgagagggatgaccggcgtgatctaagagaaagacgagatctaagagacgacagggaccgaagaggacctccactcagatcagaacgtgaagaagtaagttcttggagacgtgctgatgacaggaaagatgaccgggtggaagagcgggaccctcctcgtcgagttcctcccccagctctttcaagagaccgagaaagagaccgagaccgagaaagagaaggtgaaaaagagaaggcctcatggagagctgagaaagatagggaatctctccgtcgtactaaaaatgagactgatgaagatggatggaccacagtacgacgttaagtctcaagataatggatttaaactggtgtcttaaataggtttgatcacattcaaggattattatacttgtgcttcaaccaatctaaattggattctttaatgttgtttcaccataacacaaaaagcatgaacttgtattaatcctatataatagattgatcatgcaccatatccacaggaggttggaaaaaccatgccattttctggaatttaagggtgttgcattatttcatcaatcatttgttgacaaaaaagaaaaactaaaaaataaatttaaaatgtgacccttcaggtattgagtaacacctttatcttggtatagaactgatactttttttttgattttgaaatatctgataataatttggaatgaagtaaggttctgttaaaatatatttgaagaccctttaaagcagtgaatctgaaacaattttcacacccttaagtggttgatacgtacctattttaggtattttgaggtatttaccataaactaaatttagaaattttttagattcacttgaagtaaacattacaaacattggatacggtggggttttctttagattttacttgagagaaggtgagtacaaagcaatttgcagttgttgtaatgacaagattactgcgcaagtgtgaatccaaacagtatagcttttaaattttaaagcatttggtaaattatcgctgagtttttttctgttgccaatagcaaactgcttttccattaatggagaattcatgcctttcaagcattttaaatatgacaatatttataaatgtatggtttggaggaatcgtttaaattctctttcctaattttctttcttttgaagatagattctttcaacaagtaatttgtagtaatgactgtgttgacttcaattttggagcgcagtagctatgttaaagatgaactatttggtctcattgaagccaacacagaacttgctgctgtgttttttcttcagtgataaataaaatacttacagaatttgttttagtgttga

SEQ ID NO: 1824 - DNA, 5497 bp, HOMO SAPIENS
agttccggcccatgttgtttcggccgaggagccgtcgccgccatttcaagaccgtactaggtagatggtcaattagagttcccagggtttgaagcctgtaactgctgccgccgctcaagccctccagagcattgctacggctgctgcccttgtactactacctccaaatacgttcttgctggtagtggcggcagcaggaccaattacctcttttttgctctccctcgagaagctccagatggcgtcttccgtgggcaacgtggccgacagcacagaaccaacgaaacgtatgctttccttccaagggttagctgagttggcacatcgagaatatcaggcaggagattttgaggcagctgagagacactgcatgcagctctggagacaagagccagacaatactggtgtgcttttattactttcatctatacacttccagtgtcgaaggctggacagatctgctcactttagcactctggcaattaaacagaacccccttctggcagaagcttattcgaatttggggaatgtgtacaaggaaagagggcagttgcaggaggcaattgagcattatcgacatgcattgcgtctcaaacctgatttcatcgatggttatattaacctggcagccgccttggtagcagcgggtgacatggaaggggcagtacaagcttacgtctctgctcttcagtacaatcctgatttgtactgtgttcgcagtgacctggggaacctgctcaaagccctgggtcgcttggaagaagccaaggcatgttatttgaaagcaattgagacgcaaccgaactttgcagtagcttggagtaatcttggctgtgttttcaatgcacaaggggaaatttggcttgcaattcatcactttgaaaaggctgtcacccttgacccaaactttctggatgcttatatcaatttaggaaatgtcttgaaagaggcacgcatttttgacagagctgtggcagcttatcttcgtgccctaagtttgagtccaaatcacgcagtggtgcacggcaacctggcttgtgtatactatgagcaaggcctgatagatctggcaatagacacctacaggcgggctatcgaactacaaccacatttccctgatgcttactgcaacctagccaatgctctcaaagagaagggcagtgttgctgaagcagaagattgttataatacagctctccgtctgtgtcccacccatgcagactctctgaataacctagccaatatcaaacgagaacagggaaacattgaagaggcagttcgcttgtatcgtaaagcattagaagtcttcccagagtttgctgctgcccattcaaatttagcaagtgtactgcagcagcagggaaaactgcaggaagctctgatgcattataaggaggctattcgaatcagtcctacctttgctgatgcctactctaatatgggaaacactctaaaggagatgcaggatgttcagggagccttgcagtgttatacgcgtgccatccaaattaatcctgcatttgcagatgcacatagcaatctggcttccattcataaggattcagggaatattccagaagccatagcttcttaccgcacggctctgaaacttaagcctgattttcctgatgcttattgtaacttggctcattgcctgcagattgtctgtgattggacagactatgatgagcgaatgaagaagttggtcagtattgtggctgaccagttagagaagaataggttgccttctgtgcatcctcatcatagtatgctatatcctctttctcatggcttcaggaaggctattgctgagaggcacggcaacctgtgcttagataagattaatgttcttcataaaccaccatatgaacatccaaaagacttgaagctcagtgatggtcggctgcgtgtaggatatgtgagttccgactttgggaatcatcctacttctcaccttatgcagtctattccaggcatgcacaatcctgataaatttgaggtgttctgttatgccctgagcccagacgatggcacaaacttccgagtgaaggtgatggcagaagccaatcatttcattgatctttctcagattccatgcaatggaaaagcagctgatcgcatccatcaggatggaattcatatccttgtaaatatgaatggctatactaagggcgctcgaaatgagctttttgctctcaggccagctcctattcaggcaatgtggctgggataccctgggacgagtggtgcgcttttcatggattatattatcactgatcaggaaacttcgccagctgaagttgctgagcagtattccgagaaattggcttatatgccccacactttttttattggtgatcatgctaatatgttccctcacctgaagaaaaaagcagtcatcgattttaagtccaatgggcacatttatgacaatcggatagttctgaatggcatcgacctcaaagcatttcttgatagtctaccagatgtgaaaattgtcaagatgaagtgtcctgatggaggagacaatgcagatagcagtaacacagctcttaatatgcctgttattcctatgaatactattgcagaagcagttattgaaatgattaaccgaggacagattcaaataacaattaatggattcagtattagcaatggactggcaactactcagatcaacaataaggctgcaactggagaggaggttccccgtaccattattgtaaccacccgttctcagtacgggttaccagaagatgccatcgtatactgtaactttaatcagttgtataaaattgacccttctactttgcagatgtgggcaaacattctgaagcgtgttcccaatagtgtactctggctgttgcgttttccagcagtaggagaacctaatattcaacagtatgcacaaaacatgggcctgccccagaaccgtatcattttttcacctgttgctcctaaagaggaacacgtcaggagaggccagctggctgatgtctgcttggacactccactctgtaatgggcacaccacagggatggatgtcctctgggcagggacccccatggtgactatgccaggagagactcttgcttctcgagttgcagcatcccagctcacttgcttaggttgtcttgagcttattgctaaaaacagacaagaatatgaagacatagctgtgaagctgggaactgatctagaatacctgaagaaagttcgtggcaaagtctggaagcaaagaatatctagccctctgttcaacaccaaacaatacacaatggaactagagcggctctatctacagatgtgggagcattatgcagctggcaacaaacctgaccacatgattaagcctgttgaagtcactgagtcagcataaataaagactgcacaggagaattacccctatacctgagcctcaaccttctgggggaaagggaactagataacatacttcttacttgtctgtacagtaccttgttgcagatgggtgatatataatggtaatagaatagcacagccagacttgcttcctgcatggtagggagagacacaaaagatgggaaactgcttttccacaaggaatctccgtagaattttgcggcgaccagatggtgcataggtctggaaggtctgatctcccttggtcttccatgggatggttagtgtggaggggagatatagattgtccggccgctttgtgattccatggattgattcagtcttctggatttttttttctttatattttgggtactggagcttttaaaaatgtttggtttcaggtatttttattcatgtgaagtgtatatgattctcttgagataaggttttaagctaaaatgttactccctgttttagtttctgaactctgacagattgacagggactttgctggtgtagtctttttataggttttataaaccacttgagcctatatcagtcgttttagtgtctgacctaatatttggagctatcagtgctttgttgatttagatgatgactcaagattttttctggtccatttcccatttccttttcttccctgacccccataccctcacccttaaaattctcctgtaactcaactaacaaaatcaagcctgattcaaaacatcctagggtgttttaaacacaccatctggtgccaaatgaagatttttaggagtgattactaattatcaagggcacagttgtggtactgtcattgataataatatagtttttttttttttcctaattttgacctgtttcaccagtgttttacccttgactgccccttctatgctgcttccaaaagtgatagtgtgtgtaagatttttaccttcctttctaaagttttttttttttttttttaagtgagtcctgttcttcctatttctttcagcagaaatgaaatcccaggtaagtataagtattcaagtatttgatcagtaagtcacagttatctccagtgcattaaataaccttcatcaagaaataggttataggtaaaatctctgaaggatcatctatgtattcaagtaattattttttagataataactgtcttctggacttggtcttgaagtctgtacagattcagcctcagtagtagcgaactgcactgctgtttggtttggagtacaaattagacttatagtcctcctggaacttgagttattaaaatcataggaataaaattatgggatctcaacaaagggtcgagggtttgaggcttaaacaagccaacatatgaatatatgttttgtctcgctatactgcacttacgctatccagttgcaggtaattttttgtctgctagtagtgttctagattatgtctttccaaagcgctgaggctgtgcacctattctgtagttgcagctgatgcctgaatgtatcctagctgacaaattattgattaataagaacttgaatttctggaagattcttactgttaaccaaattttgagcaaggagtctcaaaggtaattctgaaccagaattacatgttaatgaacagtgtaccttttaacagtgtaaatcacggaatatccgtgaagggatttcttaatttattttttaccggttgattgaaatatcagttaaaggttgccagcatggttgcagataaactgatgtttgaaattcgctgaaatacttaatgtggaataggataatatacttccaatgccctcaaggctgtgaccttacagccattttacatagcacatcattcctcctatagggatgaactttttcctggcacgaaaagtagccgctctggttgaagctttgcttattgtaacaggcttttatttccaggtaatatgtcttggaagacttaattctgattagagatatagatattactggaaactaattgttttttttctattgtactctgctttatcaaagaagtaaaacatttaaatcgtactacagaaattaagatgttgtcttgcgatccttaataaatgaatgatttccctttaatacggaaaaaaaaaaaaaaa

SEQ ID NO: 1825 - DNA, 408 bp, HOMO SAPIENS
  misc_feature (43)..(43): n is a, c, g, or t
  misc_feature (211)..(211): n is a, c, g, or t
  misc_feature (229)..(229): n is a, c, g, or t
  misc_feature (231)..(232): n is a, c, g, or t
  misc_feature (234)..(237): n is a, c, g, or t
  misc_feature (239)..(246): n is a, c, g, or t
  misc_feature (250)..(250): n is a, c, g, or t
taaacttcagagtcagatcctcaccagctctaacagacttgtntaacagttaaacaaacaatgacagtccgacagaagacagtcataaatgtgcaattcaaagggtaaataataacatggtaatgaatgaatcacttacgtcttgaactcataatagttatgcttttttaaaaccaaccttgaatgttatattagttaaaataacaaattntattacattaaaaaaaanannannnnannnnnnnnaaantttctgcctttggttggtaatggtatggttggtaatgactccatgttggtaattttctgcttatgccatgactcagtcattctatagctgacagaaatgcatacagatgctcaccaagacatttaatttacaagaatgtccacagtactctttttttt

SEQ ID NO: 1826 - DNA, 12602 bp, HOMO SAPIENS
ggagggagcagtcggtcgctgcgccccggcgggccactttcccgggaccccgctcgtcttccttgggccgagattttccactgcgcccctccgagtacccgggttccaaacccctagccacgacatggaagaatttttgcaacgcgccaaatctaaactgaatcgaagcaaacgcttggagaaggtccatgtggttattgggcctaaatcgtgtgacttggattctctcatttctaccttcacatatgcttactttctagacaaggtcagtccaccaggggttctgtgtttaccagtgctgaacataccaagaactgaattcaactacttcaccgagacgaggtttattttagaagagctaaatatttccgaatcattccacatattccgggatgaaattaacctgcatcagctaaatgatgaagggaagttatcgataacacttgttggcagcagtgtgctggcgagtgaagacaaaactttagaatcagcagttgtcaaagtcattaatccggttgagcagagcgatgccaacgttgagttccgagagtcttcctcttctctcgtgctaaaggagattctccaagaggctcctgagctcatcaccgagcaactggctcatcgcctcagaggtagcattcttttcaagtggatgaccatggaatcagagaagatctcagagaagcaggaggaaattctttctatcctggaagaaaaatttcctaacttgcctccaagagaggacatcatcaacgtcctacaggagacccagttcagtgctcagggtttaagtattgaacagacaatgttgaaagatctaaaggagctgtcagatggagaaataaaagtggccattagtactgtgagcatgaaccttgagaattgtctatttcacagcaatattaccagtgacttgaaagcatttacagacaagtttggttttgatgtcctcatcctgttctccagctatctgtcagaggagcagcagccgagacgacagattgctgtgtactcagaaaacatggagctgtgcagtcagatttgctgtgagctggaagagtgtcagaacccttgcctagaactggagccctttgactgtggctgtgatgagatcctggtgtaccaacaagaggacccttcagtgacttgtgatcaggtggttctcgttgtcaaggaagtcatcaacaggaggtgtccagagatggtctccaatagccggacatcctcaacagaagccgtggcaggcagtgcccccctctcccaggggtcttctgggattatggaattgtatggttctgacatagagccacaacccagctctgtgaatttcatagagaaccctccagatctcaatgattctaaccaggctcaggtggatgccaatgtagaccttgttagcccagacagcggactggctaccattaggagcagccgctcatccaaggagagctctgttttcctcagtgacgacagccccgtgggagaaggtgctgggcctcaccacacccttctcccagggcttgactcctacagccccatccctgaaggggcggtggcggaggaacatgcatggtctggagaacacggtgagcacttcgacctcttcaattttgacccagcacccatggcttctgggcagtcccagcaatcttctcattctgcagactactccccagcagatgacttcttccccaacagtgacctgtcagaaggacagctccccgctgggcctgaaggacttgatggcatgggaaccaacatgtctaattattcatccagttcacttttgtcaggggctggcaaagatagccttgtggaacatgatgaggagtttgtccagagacaagacagtcccagagataactctgaaagaaatttgagcctgacagattttgtgggagatgaatccccttccccagaaaggctaaaaaatactggaaagaggatcccaccaacacccatgaatagtttagtagaaagctcgccatccactgaagaaccagcctcactctatacagaagatatgacccaaaaagcaactgacacaggtcacatggggccacctcagacccatgcacggtgcagcagctggtggggtggtttggaaattgactccaaaaatattgcagatgcgtggagttccagtgaacaggaatctgttttccagagccctgaatcatggaaagagcataagccaagctccattgataggagagcctcagattctgtatttcaaccaaagagcctcgaatttacaaagtcaggtccctgggagtctgaatttggtcagcctgaactgggtagcaatgatattcaagacaaaaatgaggaaagcttgccgttccagaacctgcccatggagaagtcacctttgccaaatacatctccccaaggaacaaaccacctgatagaagactttgcttctttgtggcattctggtcgctctcccacagccatgcccgagccctggggaaatcctacagatgatggtgaaccagcagctgtggcgccattcccagcctggagtgcatttggtaaagaagatcatgatgaagctttaaaaaatacctggaatttgcacccaacaagcagcaagacaccttctgttagggacccgaatgagtgggccatggcaaaaagtgggtttgccttttcttcttcagaactactggacaattcacccagtgagataaacaatgaagcagctccagaaatctggggcaagaaaaacaatgactccagggatcacatctttgcacctggaaatcccagttctgatctggatcacacatggactaattctaagccaccaaaagaagatcagaatggtttagtggatcctaaaactaggggcaaggtatatgaaaaggtagattcctggaacctttttgaggagaatatgaagaaaggagggtcagatgtcctagttccttgggaagattccttcttatcttacaaatgttctgattacagtgcatccaacctaggagaagattcggtgccttcccccttagataccaattattccacctcagactcttacacatcaccaacatttgctggagacgaaaaggaaactgaacacaagccatttgctaaagaggaaggttttgagtcaaaagatggtaactccacggcagaggagactgacattcctcctcagtcactgcaacagtcatctcgaaatcgaatcagttcaggtcctgggaacctagacatgtgggcttcacctcatacagataacagttctgaaataaataccactcacaacctggatgaaaatgaactcaagacagagcacacagatggtaagaatatctccatggaggatgacgtcggggaaagcagccagtccagttacgacgaccccagcatgatgcaactgtacaatgaaacaaaccgacaactcacacttttgcacagcagcaccaactcccggcagacggcccctgacagtctcgacttgtggaacagagtgattttggaggatactcagtccactgcaacgatctcagatatggacaatgatttggactgggatgactgcagtgggggtgcggcaatccccagtgatggtcaaacagaaggatacatggctgaaggttccgagccggaaacccgatttacagtgagacagctggaaccctggggcttggagtatcaggaagcaaatcaggtagattgggagctccctgcctctgatgagcataccaaggacagtgctcccagtgaacatcacacattgaatgagaaaagtgggcagctaattgcaaacagtatttgggattctgtcatgagagataaagacatgtcatcattcatgttaccaggctcctcacatatcacagattcagagcaaagggaattgcctcctgaaatccccagccattcagcaaatgttaaagacactcattccccagatgcgccagcagcctctggaaccagtgaatcagaggcacttatatctcatcttgacaagcaggacacagagagggaaaccctgcaaagtgatgcagcatccttggcgactaggcttgagaatccagggtattttccacacccagatccatggaaaggtcatggcgatggacaaagtgaaagtgagaaggaagcccagggagccactgacagggggcaccttgatgaagaggaggtgatcgcctctggtgtggagaatgcctcagggatttctgaaaaagggcagagtgaccaggaactgtcttctctggttgcatctgaacatcaggaaatctgcattaaatcaggcaaaatcagctctcttgctgtcactttcagtcctcaaaccgaggaaccagaggaagttttagagtatgaggaggggtcttacaatctagactcccgtgatgtgcaaacagggatgtccgcagataacctgcagccaaaagatacccatgaaaaacacctcatgagtcaaagaaattcaggtgaaactactgagacttcagatgggatgaatttcacaaaatatgtatctgtacctgaaaaggatcttgagaaaactgaagaatgtaactttctagagccagagaacgtgggtggagggccacctcacagagttccccgaagtcttgattttggggacgtccctatagacagtgatgtgcatgtcagcagcacatgttctgagataaccaaaaatcttgacgttaaggggtctgaaaatagccttccaggagccggttcgtctggaaattttgacagagatactatttctagtgagtatactcattcaagtgcatcaagtcctgagttaaatgactcttcagttgcactgtcctcctggggccagcaacccagttctgggtatcaagaagaaaaccaaggcaactggagtgaacagaatcaccaagaatctgaactaattaccactgatggccaagtagaaatagttaccaaagtgaaggatttagagaaaaacagaataaatgagtttgaaaagagctttgatcgcaaaactcctacatttttagagatctggaatgactcagttgatggtgattccttttcctctttatccagtcctgaaacaggcaaatattctgaacattcagggacacatcaggaaagcaatctaattgctagctaccaggagaaaaatgaacatgacatttctgcaactgtgcagccagaggatgccagggtcatttcaacaagctcaggttctgatgatgacagtgtcggtggtgaagagtcaatagaggaagagatccaggtggccaactgccacgttgctgaggatgaatccagagcttgggattcattgaatgaatctaataagttcttggtcacagctgatcctaagtctgaaaatatttatgactacctagacagctcagagccagcagagaatgagaataagtcaaacccattctgtgacaatcaacaaagcagccctgatccctggactttctcaccattaacggagactgaaatgcagattacagcagtggagaaggagaagagatcttctccagaaacagggacaacaggagatgttgcatggcaaatatctcccaaagcttcgttcccaaagaacgaagataattctcaactggaaatgctgggcttctcagctgatagcactgagtggtggaaggcctcaccccaggaagggagactaattgaaagtccatttgaaagggagctgtctgactccagtggtgtgttggagataaattcttcagtacaccaaaatgccagtccctggggagtaccagttcagggtgatattgagcccgtggaaacacactatactaatccttttagtgacaaccatcagtcaccctttctggaaggtaatgggaagaactcccatgagcaactctggaacattcaaccaaggcagccagacccagatgctgacaagttcagccagcttgtaaaattagaccaaattaaagaaaaggactcaagagagcaaacctttgtgtctgctgctggtgatgagctgactcctgaaacacctacccaagagcagtgtcaggacaccatgctgccagtctgtgatcatccggacacagcctttactcacgcagaggaaaatagttgtgttacatctaatgtttcaactaatgaaggtcaagaaacaaatcagtgggaacaagaaaaatcatacctaggtgagatgacaaattcaagcattgccacagaaaattttcctgctgtcagttctcccacccaactgataatgaagccaggctctgaatgggatggctctaccccaagtgaggactcccgaggtacctttgtgccagatattttacatggcaactttcaagagggtgggcagctggcctctgccgcgcctgacttgtggatagatgctaagaagcccttcagtttgaaagcagatggtgagaatcctgatatcctgacgcactgcgaacatgacagcaattctcaggcttccgacagccctgatatatgtcacgattctgaagcaaagcaagagactgagaagcacctcagtgcttgcatgggacctgaagtggaatccagtgagctttgtctcactgagccagagatagatgaagaacccatttatgagcctggacgggagtttgtcccatccaatgcagaactcgattctgaaaacgcaactgtgctgcctccaattggctatcaagcagacataaagggctcctctcagcccgcctctcataaaggttcacctgaaccttctgaaataaacggtgacaacagtacaggtttacaagtatcagaaaaaggagccagcccagatatggcaccaattttggaaccagttgacagaagaatcccaaggattgaaaatgtggcaactagcatttttgtaactcaccaagagccaactccagaaggtgacggttcttggatatcagacagcttttctcctgaaagtcagcctggtgcaagagctttgtttgatggtgatccacatttatccacagagaatcctgccttggttcctgatgctttgctagcctcagacacttgtctggatataagcgaagctgcctttgaccacagtttcagcgatgcctcaggtctcaacacatccacgggaacaatagatgacatgagtaaactgacattatccgaaggccatccggaaacgccagttgatggggacctagggaagcaagatatctgctcatctgaagcctcgtggggtgattttgaatatgatgtaatgggccagaatatcgatgaagatttactgagagagcctgaacacttcctgtatggtggtgaccctcctttggaggaagattctctgaagcagtcgctggcaccgtacacacctccctttgatttgtcttatctcacagaacctgcccagagtgctgaaacaatagaggaagctgggtctccagaggatgaatctctgggatgcagagcagcagagatagtgctttctgcacttcctgatcgaagaagtgagggaaaccaggctgagaccaaaaacagactgcctggatcccagctggctgtgctgcatattcgtgaagaccctgagtccgtttatttgccggtaggagcaggctccaacattttgtctccatcaaacgttgactgggaagtagaaacagataattctgatttaccagcaggtggagacataggaccaccaaatggtgccagcaaggaaatatcagaattggaagaagaaaaaacaattcctaccaaagagcctgagcagataaaatcagaatacaaggaagaaagatgtacagagaagaatgaagatcgtcatgcactacacatggattacatacttgtaaaccgtgaagaaaattcacactcaaagccagagacctgtgaagaaagagaaagcatagctgaattagaattgtatgtaggttccaaagaaacagggctgcagggaactcagttagcaagcttcccagacacatgtcagccagcctccttaaatgaaagaaaaggtctctctgcagagaaaatgtcttctaaaagcgatacgagatcatcttttgaaagccctgcacaagaccagagttggatgttcttgggccatagtgaggttggtgatccatcactggatgccagggactcagggcctgggtggtctggcaagactgtggagccgttctctgaactcggcttgggtgagggtccccagctgcagattctggaagaaatgaagcctctagaatctttggcactagaggaagcctctggtccagtcagccaatcacagaagagtaagagccgaggcagggctggcccggatgcagttacgttgcaggctgtcacccatgacaatgaatgggaaatgctttcaccacagcctgttcagaaaaacatgatccctgacacggaaatggaggaggagacagagttccttgagctcggaaccaggatatcaagaccaaatggactactgtcagaggatgtaggaatggacatcccctttgaagagggcgtgctgagtcccagtgctgcagacatgaggcctgaacctcctaattctctggatcttaatgacactcatcctcggagaatcaagctcacagccccaaatatcaatctttctctggaccaaagtgaaggatctattctctctgatgataacttggacagtccagatgaaattgacatcaatgtggatgaacttgatacccccgatgaagcagattcttttgagtacactggccatgatcccacagccaacaaagattctggccaagagtcagagtctattccagaatatacggccgaagaggaacgggaggacaaccggctttggaggacagtggtcattggagaacaagagcagcgcattgacatgaaggtcatcgagccctacaggagagtcatttctcacggaggatactatggggacggtctaaatgccatcattgtgtttgccgcctgttttctgccagacagcagtcgggcggattaccactatgtcatggaaaatcttttcctatatgtaataagtactttagagttgatggtagctgaagactatatgattgtgtacttgaatggtgcaaccccaagaaggaggatgccagggctaggctggatgaagaaatgctaccagatgattgacagacggttgaggaagaatttgaaatcattcatcattgttcatccatcttggttcatcagaacaatccttgctgtgacacgaccttttataagttcaaaattcagcagtaaaattaaatatgtcaatagcttatcagaactcagtgggctgatcccaatggattgcatccacattccagagagcatcatcaaactggatgaagaactgagggaagcatcagaggcagctaaaactagctgcctttacaatgatccagaaatgtcttctatggagaaggatattgacttgaagctgaaagaaaagccttagttggccatgctggaagaagaggatgcttttctggttcatggttctgttgaaacatatctacctgaaagagacagggctgatgttacctttttccactttgcactacctggtgccattctaaatttctaaggggaaaaatagaaagtttgtttactcttaagatattttatgaaattgtgtgtactttcctattttgccaattatgtgcctcaaagattttagttgagccttagcaagaaagtaggaccttccatttcaatacttcattaacacggtgtagtgatactttgtcccttagactggtgtttaccagtaagatacctttaatccactgttaagtatgagtggatttgtttccatagattagctggatttccttttggtgattgcattaggtttaaagtacacaggtctcaactctccccaggaaagtttcccctgtttgactccacctttaaaatcctaagcctgactaggacagccacaaaccacacaaggtgtaaaaccatcatcagctaagtgcccgttttgttcttgtttaccagaatctcctttaacttctcaaagggaagccgggctttctaatccacgtcaactttattttagttgtcaaattgggcattatattttatgtaaattggtcttttaacatcattttcctgatgaatgttggtgaccaccacattgtgaaatttaagaatccgtgttgcatgtttggtagctctctgagtttcaggccataaactcagctccagaggttaccttttaagtgccaagaactcaagtgcaaggtggcctactcaaaaatcatttggtagcattcagttattcatgaattcctctctcgcatgcattataaaaagtgatctgctttaaaacaccgtaatctgatcataggcttaaaattaaatatgagtattactttcatgtacaaaatatttcctttatagtcttcatatgccctttaaaatgccaacaagatttcaagtctgtaggcctctagtgaggtggggtggcaaaccacagctaagtctcgctcaccactgcaagctaagaatggtttttacattttgggttggaaaaattttttttgaatatttcatgacacatgaaaattattcaaatgttagtgccgataaataaagtggtactgaaacacagccacacaaacttgtttttgtactgtctacagctactttcacactacagccgcagagctgagcagttcagcagaccgtatgtcccacaatgcctaaaacattgactatgtttacagaaaaagtttgctgacccctgctctagcaaacgcatcctttcctactccaccccaatttgtatttagatagtttctctaacagaacggacaaatgaggctgcaaactaatttatttttgtcaaaaatcaatgttttgacatccacagacagtgaaataaaagaaatggcttgctgaaaaacatgaggagtcctagccacaaaatcactgcttaggttgcaattgccaaaatgaagccttcttagaagcacttctttagtatatacaggtgttggctgaagtccgtgcctcactctgggaaccattcttagtctccagtgtctcctattacaaagaagctggcagaaataaaaatgaaggggtgagagcggttccaccctagtctcatggtggaaaattcattggggagagctgtccaggatatttggagtcctgggtagaaggagcttgtaactactttaaagtcgacatctttgcacaggtgattgagtttctctgacctcattgcttcacctctgtctcctcccgtccttccgcacgtgcccacacacacgcagttcagccctctttcctccataagcctccatcgttttctcttttctcctcttgatcctttcaagcgagtatcttgttgaattgtatgttctgttggatctcctccttcataacatctggcttgttggacagaaaaaccctacagcccaccccctcccacagcccacctccacttttgaaagcccaaattacacctctcccagaacacagtgttgacgtaaatacagttacccaatattcctgtttgttcacctatttgctactttcactcagtagcatcccattttgtaaaatgaattccatggtcaccctgtcacaggaagtaatgaaaaatccagtgttcagtgtagtggtgcaaacctgagggcatagagctgttcatagagggctcttgttatagccaaacagacacagcaacaatctcaccatttatatatatatttttaacttgtccagctcatctatggaaaactactcaggtggtatgctgtttgaagcctcatcttcctacatgaaaattatgggcatttgtcccaatgattttgtttcagctgttctgtaggctgcataaccactctgatatttaggtatctgctattttattatcttaaaagacaaattaatttaattgcatgtgctagggaaaagctaccatgtacattcaccccaagtaaatagaatcctagatgaatcctagaaaaataatccctaagcagataggtagacagaggtaaacattcacatgatttagctctctagctcttgcactctgaacattcttgctttggttctgacttctgggaactgctttgcatttctcctatagatctgtagttaagggaaccaaggggtcattggggcaaaagcattgtttctcaaagctccttgattaagagaaagaacagaaatttgcacagaagatagtgtcaaggagtgagaaagtttgtttgagggcagtagctcagtgtggaagaaaatcctgaagtttctgttgaagccatacaatgttctatggggttactctctaagacattctctgaggtgtgtgaggaagtcactactcctagcctttgttaagatgtaattttaaatattcagttatggtactatgtttgcaactctcgtcttatcacaatgcctcagtagtttgttcccttagaaacatttagatgtgcacaaattaatcttttatatatctaaaggtttttctatcatgcattggattgctcagaataaagtgtctgttagacttcgttttggtaaataaattctccataatgtagattaataatataaaagtctttaatgacacaatatatctatatagcctcactgtataattcagaaataaaaattgattctgcaaaaaaaaaaaaaaaaaa

SEQ ID NO: 1827 - DNA, 2124 bp, HOMO SAPIENS
ctcacgtgacaagcgtcccacccggaagcgaaatctccccttctacagagttcctccggcgcttcctccaccccgggatacacagaacctcatctcctacggtgctgaagcctgcagcagggcaggatgggcaggagagcagagccgcggagtctgcggcgcgggtgaagagcggcgcgtaattcccgcagcaagattgttccgcgcccgcagcccctggactagcaggatccgaaccccggcggctgcgtgcttataggcgcagacgtcagagagcccgcggcttaaagcgcgtcgcctggctagcgccaccccctagccttcttcaaggcctccagggctgggcccaagcgcccgtcgacggcaccctgggcccagaggactcgcgggcctcatctccaatgattcagaactcacgtccgtcgctgctgcaaccccaagatgtcggagacacggtggaaacgcttatgttacatccggtgatcaaggctttcctgtgtggctccatcagtgggacctgctctaccctccttttccaacctctggatctccttaaaacacgcctgcaaaccctccagccctcagatcatgggtctagacgtgttgggatgttggctgtactcttgaaggtggttcgcacggagagtcttttgggcctttggaaagggatgtccccttccattgtgagatgtgtccctggcgttggaatctactttggcactctctactctttgaagcagtatttcttgcgaggccatcccccaaccgccctggagtcagtcatgctgggggtgggctctcgctctgttgcaggggtctgtatgtcacctatcactgtaatcaagacgcgctatgagagtgggaaatatggctatgagagtatctacgctgccctgaggagcatctatcacagtgaggggcaccggggcctcttcagtggcctgacagcaactctccttcgagatgcgcccttctcaggaatctacctgatgttttacaaccagaccaaaaatatagtgcctcatgaccaggtggatgcaacccttattcctattacaaatttcagctgtgggatatttgctggtattctggcctcactggtaactcaacctgcggatgttatcaaaactcatatgcagctttatccactgaagtttcaatggattggccaagcagtgacacttattttcaaagactatggactacgtggcttcttccaaggtggcatcccccgagccctccgcagaactctaatggcagcaatggcgtggacggtgtatgaagagatgatggccaagatgggcctgaagtcctgaccaagagaggactgggaacgggtgaaatctgttgccctgcttggtttctgccaagggctgctgcttcttactattctgcagtaagatgaagtcctacctggaaaaccaggcagaaattgtgttgcctttgccttcagtaatccccttaaggagaaaatatatggacctgatttcagccttcagaatctccaaaagaggagtcatcaattcatagagcacactagggtgttaggagagagctttgcatactctgagaggctacttggaaaggcattttcccaggagagctctgtcaggtggctgcgcttcagccccacccctacaccacagggtctccttgggtatgttcttgggcaagcaatcacaaagccagagaagctgtaagctgcctgccgggcctgaggagctccaaccagggaagactggatgtgaggagaggagtcactgtcaccaggtcacagactgactgaggtgatggtaggatgaggaggaacagatgcccttctttaattggttctcagttaacttctcagaggctctggagaacgggacagtggctttctagcctctgaatgttccaaataaaattttttggtcttggcccctgtactgttttacctctaaattctggcatttttttttccctgcaattaaagtgctgtactttatttattgaactttatcattgaaagctgtttggaaaacctaaaagatgttgtcacacttctgttttctttacctgtgccttataaaaatggaccaaacccttttctaaaataaaatagttctagggtggctggttattgac

SEQ ID NO: 1828 - DNA, 1977 bp, HOMO SAPIENS
ggggtgatcatggacgcttgacaacctgcgggcaggcgccgggaggccgagccagcgactaagaggaccgagaggtggcgtggacagatttcaaggccagagaatggcaggggaacagaaaccctcaagtaatctcctggagcagtttattttactagccaaaggtaccagtggctcagccctcactgctctcataagccaggtcttagaggctcccggagtgtatgtctttggagaacttctggagctggccaacgtgcaggagcttgcggaaggagctaatgctgcttatttgcagttgttgaacctgtttgcctatgggacatacccagattacatagccaacaaggagagcctgccagaactgagcacagctcagcagaacaagctgaagcatcttaccatcgtgagcttggcatcaagaatgaagtgtatcccctactccgtgttgctgaaagacctggagatgcggaatctccgggaactagaagaccttatcattgaggctgtctacactgacatcatccagggcaagctggaccagcgaaaccagctgctggaagtggatttctgcattggccgtgacatccgaaagaaggatatcaataatattgtcaagaccctgcatgaatggtgtgatggctgtgaagcagttctactgggcatcgagcagcaagttctgagagccaaccagtacaaagagaaccacaaccgaactcagcagcaggtagaagcagaggttaccaacatcaagaagacactcaaagccaccgcatcctcctcggctcaggagatggagcagcagctggctgaacgggagtgtccccctcacgctgagcagaggcagcccaccaagaagatgtccaaagtgaaaggtctggtctccagccgccactagggccggctggggcagctggcactcaccaggcctgggtcaggtggggaggggacaccaagggcccatttcctcccctctctacctgcagtgagttccagacctgcccgtcccctcaccagcgcctccccaccctgttggtactgttccagaaaaactgttactccccctcacccactccctccttccccagttgttcccttcagactcaggggctccaccaatgccatcccaaaacagggtcagacactgctcagcttccctccaggaggttcttgtctctgtgtaagggcttgtctccctcccagtttttcttttgctccacgtcattttgtcaggctggttataagccggaggcagctttaaccagcccccagggatgattgtgaaggaggcccctccccttgtgaggagggggcactcctctccagcccctggtaccacagtcctcacgatggtgcagtgatttctagccaggcgtcaagatgcgctgctttccctctcctgcctcattccttgttggcagctccagttcaggccgtggagggacgtgatgctgggctgtgtttactaaacccacgggttttcagcctcttaagcccagctccgatctccaattagttgagagcgctgggttgactaacctctggtatctgagcacagacagagggtgctgtgggtctgctgggtggcagaaatggttccttccggcttggcgttctctcctggccactcttcctgctgcctctgactactcagccttgttttcggtgtgtaggccccagctgcccactggaactgccggctaatgcttgctctcccaagatctttaactcctcctggctgcacctgggtagggatggtggcatcgatgcccctctgtctgctgaaggacctgttgctgcttctgtcttttcacccctccttggctgatgacccagagccctctgatgatggcattctcctggcaagagaaaaagacttaactagacttctgaacttgaacagtttcaggttatattttaatttttttttttttgtacaggttctgattctaatacatttcaacatgcttttgtccc

SEQ ID NO: 1829 - DNA, 3711 bp, HOMO SAPIENS
gtcctcctcgtggcggtcattttggcctctgtcctgtttgtccagcccgccagtttctgcagtggaggtcgcgactgagggacgggacagagaagtcgcgaaagtgggccagaggttctgcgacaccacctcgggtgagctgcgccaggcccgggatagggactgttgtgttcgaatgcccgccccggtcggccgccgctccccgcctagtccacggagctcaatggcggcagtcgcgctgagggactcggctcagggtatgacctttgaggatgtggccatttatttctcccaagaagagtgggagctccttgatgagtctcagaggttcctgtactgcgatgtgatgctggagaactttgcacatgtaacatccctgggttattgccatggaatggagaatgaggcgatagcttctgagcagagtgtatctatacaggtcaggacttctaagggcaatacacccacccagaaaactcacctcagtgagattaagatgtgtgtcccagtcttgaaagacattttgcctgcggctgagcaccaaaccacatcccctgtgcaaaagtcatacttgggtagcacaagcatgagaggcttctgcttcagtgctgaccttcaccagcatcaaaagcattacaatgaagaagagccctggaaaaggaaggtggatgaggctacatttgtgaccggctgcagattccatgtgttgaattatttcacctgtggggaggccttcccagcccccacggacctactccaacacgaagccactcccagtggtgaggagccacacagtagcagcagcaagcatatacaggcatttttcaatgcaaaaagttattacaagtggggtgaatacagaaaagcttcaagccacaaacacacacttgttcagcatcagagtgtctgttctgaaggagggctttatgagtgtagcaaatgtgagaaagccttcacttgcaagaacacacttgttcagcaccagcaaattcacactggacaaaagatgtttgagtgtagtgaatgtgaggaatcctttagcaaaaagtgccacctaatcttacacaagataattcacactggagaaaggccttatgaatgcagtgatcgtgagaaagcctttatccataaatctgaattcattcaccaccagagacgtcacactggaggagtgcgtcatgagtgtggtgaatgtaggaaaacctttagctacaaatctaacctcattgaacaccagagagttcacactggagaaaggccttatgaatgtggcgagtgcgggaaatcctttagacaaagctctagcctttttcgacaccagagagttcactctggagaaaggccttatcagtgctgtgagtgtgggaaatcctttagacaaatcttcaatctcattcgacatagaagagttcacactggagaaatgccttatcagtgcagtgattgtgggaaatcttttagctgcaaatcggaactcattcaacaccagagaattcacagtggagaaagaccttatgaatgcagagaatgtgggaaatcctttagacaattctctaacctcattcgacaccgcagcattcacactggtgataggccttatgagtgcagtgaatgtgagaaatcctttagccgcaaatttatcctgattcaacaccaaagagttcacactggagaaagaccttatgaatgcagtgaatgtggaaaatcctttacccgcaaatctgacctcattcaacaccggagaattcatactggcacaagaccttatgagtgcagtgaatgtggcaaatcttttagacagcgctctggcctcattcagcaccggagacttcatactggagaaaggccttatgaatgtagtgaatgtggaaagtcttttagccaaagtgctagcctcattcaacaccagagagttcacactggagaaaggccttatgaatgtagtgaatgtgggaaatcctttagccagagctctagcctcattcaacaccagagaggtcacactggagaaagaccttatgagtgcagtcaatgtgggaaaccctttacccacaaatcagaccttattcagcaccaaagagttcacactggagaaaggccttatgaatgcagtgaatgtgggaaatcctttagccgcaaatctaacctcattcgacatcggagagttcacactgaagaaaggccttaaatgtgaagggaatgtgctatttctttattcagtataatagcactggaggagactgtggtagccatcttcgtaaatttaaactttgagcacccacagtggggtattcttcataagtttcaggtatgtgggaagctctgaggaggttcattgtaatttctaatctgccgaggcctatagcctgatttatgtcactgccaatttctgaggctgaagccatttcacatttcacccctaccacctggcaggtgcacaccatgtgcatgagtcacttccccacagtgctcagagaagcaaacctctgtactctcccatttgcttggggaaattattaatagcccaagcatgtagggtcttcatgtcttttctctgactttagagtatacacctgacccagttgtggtccagagaatctgagttgtgctgtcagctttctaaggattacttttttaaggaacattgtcggtctcacatgatgcttgtaatgaatttttccacattctgattcaccagcctggaaactgcttggtgcacattgctttaatttataatgtttttataaaggttttaaaaaaatttacgcacctttaatcttgggtgttctattcattgcatagaatgacttgtaagcagaatagtgatgtcagcatgaaggggtgaatagattttgtggagatctcaaactttctgtactcagaagggacaatgtgatggcagaagacagctctttgttctgtattgctctaattggcctgctgcccaaggcctcaaagtaaagactgccaggctttgtgttcctgtattgtggcctggtgccatttttgtcaggtcagaggtcaccatgaaaaggaggcagttgtgacaatccccagtgcttctgtgaacgtgaattttgttcagttgtccacaggagatccacataattcctagcactggtgaggggaatctgttgcccaggtcctgcaaaggagccaggtgccatggcatataagtcagtgtagactggtgccatttgttgtcagactataggtgtggaggtgaaattacaggttcaacagtaattgggacagaaactccaggtaaatggggagtggagaagactgcagtaaattagatggaatgactcttctaaaagttcatctacaaattttccagtgaatatggttgtgtaggatcagtgcatacagaaattctcaggatcttctgtttactatcgctgagatcattatcagaaaatagtctggccgggcatggtgtaatcctaacactttgggaggccaaggcgggcggattgcctgagctcaggagttcaagaccagcctgggcaacatggtgaaatcccatgtctactaaaatacaaaaaattagccaggcgtggcagcatgcgcctatagtcccagccacttgggaggctgaggcaggagaatcgcttgaacccagaaggcggaagttgcagtgagctgagattgcaccactgcactccagcccaggcaacagagtgagactccgtctccaaaaaaaaaaaa

SEQ ID NO: 1830 - DNA, 6435 bp, HOMO SAPIENS
aaagggggcggcagcgccggcggagcggaggcgggtctcacgtgggccagcgcagagcctgcggaagggacggatgcggatctcgtcgctgtcaccttgaaagtgaccgaggggcttgactgtggactccttacgccgcccacccgggcccggcggtcccagccttctcgcagggccccttctcagcagaagcaagcggggccgagaaagcgggtggaatagggttgctgcaggtcccaaagacccctcgtggcgcctcgctactttctgcagcttgtttgcactttttcacgctctagaaaaatctcatcttaattaagggaacaacaaatcatttaatcttcagagcatcttagactgaaaacctttcaactgtgctgaaaaacctagaagacagaccattttgcccaccctctcatttaaaaggaattgaagaagaaataaaatggcagaggtttaaggttactattcaggatgactgatgataattcagatgataaaatagaagatgaattgcaaaccttctttaccagtgataaagatggaaatacacatgcatacaacccgaaatcaccacctacacaaaactcttcagccagcagtgtgaactggaattctgccaacccagatgacatggtggttgattatgaaactgaccctgctgtagttactggtgaaaatatttctttaagccttcagggtgttgaagtatttggtcatgaaaagtcttctagtgatttcattagtaagcaggtgttagatatgcataaagattctatttgtcagtgtcctgcacttgtaggtactgagaagcccaaatatctgcaacacagttgtcattccctagaagcagttgagggccagagtgttgagccatctttgccttttgtgtggaagcctaatgacaatttgaactgtgcaggctactgtgatgccttggagctaaaccaaacatttgacatgacagtggataaagttaactgcacctttatatcacatcatgccatcggaaagagtcagtccttccatactgctggaagcctgccaccaactggtaggagaagtggaagtacatcttctttatcctattccacttggacatcttcccattctgataagacgcatgcaagagaaactacttatgatagagaaagctttgaaaaccctcaagtcacaccatcagaagcccaagacatgacttacacagcattttctgatgtggtgatgcaaagtgaggtttttgtttcagatattggaaatcagtgtgcatgttcttcaggaaaggtcaccagtgagtacacagatggatcacaacaaagactagttggagaaaaggagacacaagcactaacaccagtttctgatggcatggaagtccccaatgattctgcattacaagagttcttttgtttatcccatgatgaatccaatagcgaaccacattcacagagctcatacaggcacaaggaaatgggccaaaatctgagagagacagtgtcctattgtcttattgatgatgaatgccctttaatggtgccagcttttgataagagcgaagctcaagtgctgaacccagagcataaagtcactgagactgaagacacacaaatggtctccaaaggaaaggatttgggaacccaaaatcatacctcagaattgattctaagtagcccgccaggacaaaaggtgggctcgtcatttggactgacttgggatgcaaatgatatggtcattagcacagacaaaacgatgtgcatgtcaacaccagtcctagaacccacaaaagtaaccttttctgtttcaccgattgaagcgacggagaaatgtaagaaagtggagaagggtaatcgagggcttaaaaacataccagactcgaaggaggcacctgtgaacctgtgtaaacccagtttaggaaaatcaacaatcaaaacgaataccccaataggctgcaaagttagaaaaactgaaattataagttacccaagaccaaacttcaagaatgtcaaagcaaaagttatgtctagagcagtgttgcagcccaaagatgctgctttatcaaaggtcacgcccagacctcagcagaccagtgcctcatcaccctcatcagtgaattcaagacaacaaacagtcttgagcagaacaccgagatctgacttgaatgcagacaaaaaagcagaaattctaattaacaagacacataagcagcagtttaataaactcattactagccaggctgtgcatgttacaactcattctaaaaatgcttcacacagggttccaagaacaacatctgccgtgaaatcgaatcaggaagatgttgacaaagccagttcttctaactcagcatgcgagaccgggtccgtttctgcgttgtttcagaagatcaaaggcatactccctgttaaaatggaaagtgcagaatgtttggaaatgacctatgttcccaacattgataggattagccctgaaaagaagggtgaaaaagaaaatgggacatctatggaaaaacaagagctgaaacaagagattatgaatgagacttttgaatatggttctctgtttttgggctctgcttcaaaaacaacgaccacctcaggtaggaatatatccaagcctgactcctgcggtttgaggcaaatagctgctccaaaagccaaagtggggccccctgtttcctgtttgaggcggaacagtgacaatagaaatcccagtgctgatcgagccgtatctcctcagaggatcaggcgtgtgtccagttctggaaagcctacatccttgaaaactgcacagtcgtcatgggtgaatttgcctagaccacttcctaaatccaaagcatctttgaaaagtcctgcgctgcggaggacaggaagcaccccctcaatagccagcacccacagtgagctgagcacttacagcaacaattctggtaatgccgctgtcatcaaatatgaggagaaacctccaaaaccagcatttcagaatggttcctcaggatccttttatttgaagcctttggtatccagggctcatgttcacttgatgaaaactcctccaaaaggtccttcgagaaaaaatttatttacagctcttaatgcagttgaaaagagcaggcaaaagaatcctcgaagcttatgtatccagccacagacagctcccgatgcgctgccccctgagaaaacacttgaattgacgcaatataaaacaaaatgtgaaaaccaaagtggatttatcctgcagctcaagcagcttcttgcctgtggtaataccaagtttgaggcattgacagttgtgattcagcacctgctgtctgagcgggaggaagcactgaaacaacacaaaaccctatctcaagaacttgttaacctccggggagagctagtcactgcttcaaccacctgtgagaaattagaaaaagccaggaatgagttacaaacagtgtatgaagcattcgtccagcagcaccaggctgaaaaaacagaacgagagaatcggcttaaagagttttacaccagggagtatgaaaagcttcgggacacttacattgaagaagcagagaagtacaaaatgcaattgcaagagcagtttgacaacttaaatgctgcgcatgaaacctctaagttggaaattgaagctagccactcagagaaacttgaattgctaaagaaggcctatgaagcctccctttcagaaattaagaaaggccatgaaatagaaaagaaatcgcttgaagatttactttctgagaagcaggaatcgctagagaagcaaatcaatgatctgaagagtgaaaatgatgctttaaatgaaaaattgaaatcagaagaacaaaaaagaagagcaagagaaaaagcaaatttgaaaaatcctcagatcatgtatctagaacaggagttagaaagcctgaaagctgtgttagagatcaagaatgagaaactgcatcaacaggacatcaagttaatgaaaatggagaaactggtggacaacaacacagcattggttgacaaattgaagcgtttccagcaggagaatgaagaattgaaagctcggatggacaagcacatggcaatctcaaggcagctttccacggagcaggctgttctgcaagagtcgctggagaaggagtcgaaagtcaacaagcgactctctatggaaaacgaggagcttctgtggaaactgcacaatggggacctgtgtagccccaagagatcccccacatcctccgccatccctttgcagtcaccaaggaattcgggctccttccctagccccagcatttcacccagatgacacctccccaaagtccacagactctctgaaagcattttgatgcaggtctgcaggactgaccccaaggaggaacgtgggcacaagaggtatatcagcacacgtgtgatcaccgtagggtaactggagcgtcaccaccggcggaatcgcagcttctgagactggaactctggaggaagacttttgcctccgtccaaaagattcctccaaaaaaagatttaaaaaaagatttcggcatcgacacggacgttgttgcacaaagcacttaaagaacgagagcatcttgttcattgcctttttcacctaagcatagggggaaaaactctcagggccctattaagatttataacctttgtaatgttcttcaccacagacaccttcttgtgagttttcagtctgactgtgggggtggggggtgtgaatgaaatggatgtcacagagtgtcatgtgtctgatgcagcctcctctgctgtgtattaaatgtcaaaatctgaatatatctggatatgtactaatcaaataataatcaatcaatcagcatatacatttcagccaaagccatagaagaaaaagcaatagttgcttgaattatgatcatctaccaccaactctgctcagccctgtaacagggtagggagagggtataacaggaagagctttgacttgtccctgtctatacattctctgtatcttttgggggtaacttcttggcagtttttcagtgttcagccatgtcagttgaaactagatttttctgtagattttttacttacccatgtgagcctaacactatcctgtaattcattttctcaggctatgtgtaaatgtagaaccctaatttttctataaaaaaacaaactaactaactaactgtgtaaagaaagaaaaagggaagtaccaatgggtttttccaccttatttttacctttgatctacccttgcagatttaacctgtcttcttccctcccattattctcattttccttttacctttctccaccatccagagccacaaaagcaaaccttctacctcctacctacttttctctgggacaaggataaaggaatatgattttccagagccccagagccagctcatcttccaggtgctgaaaccactttccaaataaactaaagcctggatttgatattacaaattttgggaaatcttagaataaagaacgagaacaaggaagtcattggctagtataattaagaaaggtaggattcagtgcttaccgatgatgcagtacttgatagaagaaaacagtctgggaggatagcgctcatttttcagttaccctttaaggagtccctttgtctttgggaaagtagcagaatggtccgcttctttcccatgagtggaaaatgtggcttgtccaactctcctccaggttgcatttcagtttctttccaaaacttattacctcccctaatcctgagactttggaaaaggtggaaggaagaactgttgctttatctccccctccctgcatgtgtcaacattgtgatgtcagtatttactaatctacattcagtggctgtacaaataacagctgtagtaagaagagattcaggatgctagaggtgaatatttgggtcatttacatgtacactacatagcaagttgatactcatgttgcatgttcttttaaattagtgattttgtgtcttaagtctttaacttccaatacttcatcatgtatgtaaccttccatgtttgcttctgataaatggaaatgtaggttcactgccacttcatgagatatctctgctcacgcttccaagttgttctcaatgacattagccaaagttgggtttgccattcatcccctaggcatggtaaatcttgtgttgttccctgctgtcctccgtattacgtgaccggcaaataaatctcatagcagttaatataaaacatctttggaggatgggagagaacaggagggaagatgggaaacaaaatagagaattcttaagattttgtttaaaccaaatgtttcatgtagaatgcaaaatgttggcacgtcaaaaatatgaatgtgtagacaactgtagttgtgctcagtttgtagtgatgggaagtgtattttactctgatcaaataaataatgctggaatactcaagaattgcaaaaaaaaaaaaaaaaa

SEQ ID NO: 1831 - DNA, 486 bp, HOMO SAPIENS
  misc_feature (409)..(409): n is a, c, g, or t
atatggtagctgatggttcctctccccttcattactgttgcctgacgacggtccttgctgatgctgtgaactaacaaagttgtctttttgtttttaagggaacccaccctggcgtctggacagcaggttaggtttgggtggttttgagctagcactgctgtggggcaggggtggccgctccctggtgaagctaatgctgtggaagctggaatgttccttcctaaggagtgggatcatgcccctaccccagcagaggtatctcatcactcgctcatgtgcgagattctaaataaattttgttcttgggcatcttctactaggcctcctataaaatagatcttgctgtttttggtttgtgttaatggaacctcactttctagagataattctttagttttttatttaggangttttcaaaatatacaaagcaggaatgtaaggaacccgcatcacctcaaattcagtgttacccacacttgaccatgc

SEQ ID NO: 1832 - DNA, 338 bp, HOMO SAPIENS
gcctggcaagacatagcaagatcctagctctttaaaaaaaaatagtaattccccttcctcaaaattatattaataaggctacttcatctggacattcatcagtctcaaggtatggttcatctggagacagaatcattcctgcacttggtacttttggagtctgtttattcacctcacaattttaagtactttatatttaacaaaatacaaaaactgggtgctttcataaatgttttctcatctaattcttggaacagcttagtggagtatttaatattatcccccattttacagatgcagacctctgttgaatgactgccagacgtaagggttctgct

SEQ ID NO: 1833 - DNA, 1664 bp, HOMO SAPIENS
ggtggcgcggccgggcccagctgcggggcggaggcggaggcggaggagaggcctgcggcggcagggagcggcgggactgggagcgggcgccggagccgacccgagccgagccgagccgagccgagccggagcgggcggcgaaggccggcgcggcgagcagcaaccatgtcggtgttcgggaagctgttcggggctggagggggtaaggccggcaagggcggcccgaccccccaggaggccatccagcggctgcgggacacggaagagatgttaagcaagaaacaggagttcctggagaagaaaatcgagcaggagctgacggccgccaagaagcacggcaccaaaaacaagcgcgcggccctccaggcactgaagcgtaagaagaggtatgagaagcagctggcgcagatcgacggcacattatcaaccatcgagttccagcgggaggccctggagaatgccaacaccaacaccgaggtgctcaagaacatgggctatgccgccaaggccatgaaggcggcccatgacaacatggacatcgataaagttgatgagttaatgcaggacattgctgaccagcaagaacttgcagaggagatttcaacagcaatttcgaaacctgtagggtttggagaagagtttgacgaggatgagctcatggcggaattagaagaactagaacaggaggaactagacaagaatttgctggaaatcagtggacccgaaacagtccctctaccaaatgttccctctatagccctaccatcaaaacccgccaagaagaaagaagaggaggacgacgacatgaaggaattggagaactgggctggatccatgtaatggggtccagcgctggctgggcccagacagactgtggtggcctgcgcagcgagcaggcgtgtgcgtgtgtggggcaggcaggatgtggtgcaggcaggttccatcgctttcgactctcactccaaagcagtagggccgcgttgctgctcactctctgcatagcatggtctgcacctgggagatgggcggggggaggggggcgggcggggtgggaagtgcctgctgtttataatgttgaatttctgtaaaataaactgtatttgcaaatccaacattgagcttctggactacgctgactccactgctgaatcctcaatggaaagggtcgactggttgcagttgaaatgacctgaaatgtagcctctgtccttgtaagtcagttgacttgccgcacatctctttgtgtacttgtacggtactggcagaaaagtcatttttcaaaagccataggcttttccttgcccttagctgtaataatgcatctgattttgatttcctccagagctgtgtttctgtccatcacctgtgtattggccctgtgtttaccactctggcccactcctcacccccttgctcccctggtcttctggagtttgtgacattgatttgaaatggatggtgttctcttgagagcaagtgagattgttagaattaagttccaactatacagttttctaacatagctataaggtccttgttgctgtttgtgataactgatagataactcattggaaacgtgcatacatttatattcagatgaaattatggtttgcactgtctattaaatatctcgattaattttcatacaaaaaaaaaaaaaaaaa

SEQ ID NO: 1834 - DNA, 266 bp, HOMO SAPIENS
  misc_feature (151)..(151): n is a, c, g, or t
  misc_feature (154)..(154): n is a, c, g, or t
taaataccctaaatcattctccatgatcagatagtctctcaaaatttaagatgtcctatggtttcttttagatttctaaggcttaggaccatgatttttcttaatgaggcaaaatgttcaatgtgcagagcatctccaaaactcccctttntgnaaggtttttcagacatctgacaggtaacccctggctaacccagctatctactggacacaggcagcaaagccacatcaaatcaatgaatgccagacacacttggatacacctt

SEQ ID NO: 1835 - DNA, 5485 bp, HOMO SAPIENS
cgcccgcccagccccgggggcagggagagcctagattacggaagtaccgcgagcaaggagcgcggaatcggggagcgtccggagctagctggatcctctaggcaggatggtgatgggaatctttgcaaattgtatcttctgtttgaaagtgaagtacttacctcagcagcagaagaaaaagctacaaactgacattaaggaaaatggcggaaagttttccttttcgttaaatcctcagtgcacacatataatcttagataatgctgatgttctgagtcagtaccaactgaattctatccaaaagaaccacgttcatattgcaaacccagattttatatggaaatctatcagggaaaagagactcttggatgtaaagaattatgatccttataagcccctggacatcacaccacctcctgatcagaaggcgagcagttctgaagtgaaaacagaaggtctatgcccggacagtgccacagaggaggaagacactgtggaactcactgagtttggtatgcagaatgttgaaattcctcatcttcctcaagattttgaagttgcaaaatataacaccttggagaaagtgggaatggagggaggccaggaagctgtggtggtggagcttcagtgttcgcgggactccagggactgtcctttcctgatatcctcacacttcctcctggatgatggcatggagactagaagacagtttgctataaagaaaacctctgaagatgcaagtgaatactttgaaaattacattgaagaactgaagaaacaaggatttctactaagagaacatttcacacctgaagcaacccaattagcatctgaacaattgcaagcattgcttttggaggaagtcatgaattcaagcactctgagccaagaggtgagcgatttagtagagatgatttgggcagaggccctgggccacctggaacacatgcttctcaagccagtgaacaggattagcctcaacgatgtgagcaaggcagaggggattctccttctagtaaaggcagcactgaaaaatggagaaacagcagagcaattgcaaaagatgatgacagagttttacagactgatacctcacaaaggcacaatgcccaaagaagtgaacctgggactattggctaagaaagcagacctctgccagctaataagagacatggttaatgtctgtgaaactaatttgtccaaacccaacccaccatccctggccaaataccgagctttgaggtgcaaaattgagcatgttgaacagaatactgaagaatttctcagggttagaaaagaggttttgcagaatcatcacagtaagagcccagtggatgtcttgcagatatttagagttggcagagtgaatgaaaccacagagtttttgagcaaacttggtaatgtgaggcccttgttgcatggttctcctgtacaaaacatcgtgggaatcttgtgtcgagggttgcttttacccaaagtagtggaagatcgtggtgtgcaaagaacagacgtcggaaaccttggaagtgggatttatttcagtgattcgctcagtacaagtatcaagtactcacacccgggagagacagatggcaccagactcctgctcatttgtgacgtagccctcggaaagtgtatggacttacatgagaaggacttttccttaactgaagcaccaccaggctacgacagtgtgcatggagtttcgcaaacagcctctgtcaccacagactttgaggatgatgaatttgttgtctataaaaccaatcaggttaaaatgaaatatattattaaattttccatgcctggagatcagataaaggactttcatcctagtgatcatactgaattagaggaatacagacctgagttttcaaatttttcaaaggttgaagattaccagttaccagatgccaaaacttccagcagcaccaaggccggcctccaggatgcctctgggaacttggttcctctggaggatgtccacatcaaagggagaatcatagacactgtagcccaggtcattgtttttcagacatacacaaataaaagtcacgtgcccattgaggcaaaatatatctttcctttggatgacaaggccgctgtgtgtggcttcgaagccttcatcaatgggaagcacatagttggagagattaaagagaaggaagaagcccagcaagagtacctagaagccgtgacccagggccatggcgcttacctgatgagtcaggatgctccggacgtttttactgtaagtgttggaaacttaccccctaaggctaaggttcttataaaaattacctacatcacagaactcagcatcctgggcactgttggtgtctttttcatgcccgccaccgtagcaccctggcaacaggacaaggctttgaatgaaaaccttcaggatacagtagagaagatttgtataaaagaaataggaacaaagcaaagcttctctttgactatgtctattgagatgccgtatgtgattgaattcattttcagtgatacacatgaactgaaacaaaagcgcacagactgcaaagctgtcattagcaccatggaaggcagctccttagacagcagtggattttctctccacatcggtttgtctgctgcctatctcccaagaatgtgggttgaaaaacatccagaaaaagaaagcgaggcttgcatgcttgtctttcaacccgatctcgatgtcgacctccctgacctagccagtgagagcgaagtgattatttgtcttgactgctccagttccatggagggtgtgacattcttgcaagccaagcaaatcgccttgcatgcgctgtccttggtgggtgagaagcagaaagtaaatattatccagttcggcacaggttacaaggagctattttcgtatcctaagcatatcacaagcaataccatggcagcagagttcatcatgtctgccacacctaccatggggaacacagacttctggaaaacactccgatatcttagcttattgtaccctgctcgagggtcacggaacatcctcctggtgtctgatgggcacctccaggatgagagcctgacattacagctcgtgaagaggagccgcccgcacaccaggttattcgcctgcggtatcggttctacagcaaatcgtcacgtcttaaggattttgtcccagtgtggtgccggagtatttgaatattttaatgcaaaatccaagcatagttggagaaaacagatagaagaccaaatgaccaggctatgttctccgagttgccactctgtctccgtcaaatggcagcaactcaatccagatgtgcccgaggccctgcaggccccagcccaggtgccgtccttgtttctcaatgatcgactccttgtctatggattcattcctcactgcacacaggcaactctgtgtgcactaattcaagagaaagaatttcgtacaatggtgtcgactactgagcttcagaagacaactggaactatgatccacaagctggcagcccgagctctaatcagagattatgaagatggcattcttcacgaaaatgaaaccagtcatgagatgaaaaaacaaaccttgaaatctctgattattaaactcagtaaagaaaactctctcataacacaatttacaagctttgtggcagttgagaaaagggatgagaatgagtcgccttttcctgatattccaaaagtttctgaacttattgccaaagaagatgtagacttcctgccctacatgagctggcagggggagccccaagaagccgtcaggaaccagtctcttttagcatcctctgagtggccagaattacgtttatccaaacgaaaacataggaaaattccattttccaaaagaaaaatggaattatctcagccagaagtttctgaagattttgaagaggatggcttaggtgtactaccagctttcacatcaaatttggaacgtggaggtgtggaaaagctattggatttaagttggacagagtcatgtaaaccaacagcaactgaaccactatttaagaaagtcagtccatgggaaacatctacttctagcttttttcctattttggctccggccgttggttcctatcttcccccgactgcccgcgctcacagtcctgcttccttgtcttttgcctcatatcgtcaggtagctagtttcggttcagctgctcctcccagacagtttgatgcatctcaattcagccaaggccctgtgcctggcacttgtgctgactggatcccacagtcggcgtcttgtcccacaggacctccccagaacccaccttcttcaccctattgtggcattgttttttcagggagctcattaagctctgcacagtctgctccactgcaacatcctggaggctttactaccaggccttctgctggcaccttccctgagctggattctccccagcttcatttctctcttcctacagaccctgatcccatcagaggttttgggtcttatcatccctctgcttcctctccttttcattttcaaccttccgcagcctctttgactgccaaccttaggctgccaatggcctctgctttacctgaggctctttgcagtcagtcccggactaccccagtagatctctgtcttctagaagaatcagtaggcagtctcgaaggaagtcgatgtcctgtctttgcttttcaaagttctgacacagaaagtgatgagctatcagaagtacttcaagacagctgctttttacaaataaaatgtgatacaaaagatgacagtatcctgtgctttctggaagtaaaagaagaggatgaaatagtgtgcatacaacactggcaggatgctgtgccttggacagaactcctcagtctacagacagaggatggcttctggaaacttacaccagaactgggacttatattaaatcttaatacaaatggtttgcacagctttcttaaacaaaaaggcattcaatctctaggtgtaaaaggaagagaatgtctcctggacctaattgccacaatgctggtactacagtttattcgcaccaggttggaaaaagagggaatagtgttcaaatcactgatgaaaatggatgacgcttctatttccaggaatattccctgggcttttgaggcaataaagcaagcaagtgaatgggtaagaagaactgaaggacagtacccatctatctgcccacggcttgaactggggaacgactgggactctgccaccaagcagttgctgggactccagcccataagcactgtgtcccctcttcatagagtcctccattacagtcaaggctaagtcaaatgaaactgaattttaaactttttgcatgcttctatgtagaaaataatcaaatgataatagatacttataatgaaacttcattaaggtttcattcagtgtagcaattactgtctttaaaaattaagtggaagaagaattactttaatcaactaacaagcaataataaaatgaaacttaaaataaaaaaaaaaaaaaaaa

SEQ ID NO: 1836 - DNA, 531 bp, HOMO SAPIENS
ggcagtctcgcgataactgcgcaggcgcggaccaaagcgatctcttctgaggatccggcaagatggcagaagtagagcagaagaagaagcggaccttccgcaagttcacctaccgcggcgtggacctcgaccagctgctggacatgtcctacgagcagctgatgcagctgtacagtgcgcgccagcggcggcggctgaaccggggcctgcggcggaagcagcactccctgctgaagcgcctgcgcaaggccaagaaggaggcgccgcccatggagaagccggaagtggtgaagacgcacctgcgggacatgatcatcctacccgagatggtgggcagcatggtgggcgtctacaacggcaagaccttcaaccaggtggagatcaagcccgagatgatcggccactacctgggcgagttctccatcacctacaagcccgtaaagcatggccggcccggcatcggggccacccactcctcccgcttcatccctctcaagtaatggctcagctaataaaggcgcacatgactcc

SEQ ID NO: 1837 - DNA, 4891 bp, HOMO SAPIENS
tttccgagtgcggtagcaggagggggcggggaggtaagcggaggctccgagctctaggccggccggcggtggcggcggcgaggccgggactcgggcttagggcctgctgtggaggcagcggcggacgccgagctaagcagtttctctggaaacccccctggtaagtgtggaggaggcgggacactctgacccaagacgaaaggcctgtagctccagccaaagaaaataaaccttaggagggagaaggaaaaaaaaaatccatcagctgttcctgagaacagcctgcattggaatctacagagaggacaactaatgtgagtgaggaagtgactgtatgtggactgtggagaaagtaagtcacgtgggcccttgaggacctggactgggttaggaacagttgtactttcagaggtgaggtgtcgagaagggaaagtgaatgtggtctggagtgtgtccttggccttggctccacagggtgtgctttcctctggggccgtcagggagctcatcccttgtgttctgccagggtggggtacggggtttgacactgaggagggtaacctgctggctggagcggcagagcagtggccttgatttgtcttttggaagattttaaaaaccaaaaagcataaacattctggtccttcagcaatgctttctctgaagaaatacttaacggaaggacttctccagttcaccattctgctgagtttgattggggtacgggtggacgtggatacttacctgacctcacagcttcccccactccgggagatcatcctggggcccagttctgcctatactcagacccagttccacaacctgaggaataccttggatggctatggtatccaccccaagagcatagacctggacaattacttcactgcccggcggctcctcagtcaggtgagggccctggacaggttccaggtgccaaccactgaggtaaatgcctggctggttcaccgagacccagaggggtctgtctctggcagtcagcccaactcaggcctcgccctcgagagttccagtggcctccaagatgtgacaggcccagacaacggggtgcgagaaagcgaaacggagcagggattcggtgaagatttggaggatttgggggctgtagcccccccagtcagtggagacttaaccaaagaggacatagatctgattgacatcctttggcgacaggatattgatctgggggctgggcgtgaggtttttgactatagtcaccgccagaaggagcaggatgtggagaaggagctgcgagatggaggcgagcaggacacctgggcaggcgagggcgcggaagctctggcacggaacctgctagtggatggagagactggggagagcttccctgcacaggtgcctagtggggaggaccagacggccctgtccctggaagagtgccttaggctgctggaagccacctgcccctttggggagaatgctgagtttccagcagacatttccagcataacagaagcagtgcctagtgagagtgagccccctgctcttcaaaacaacctcttgtctcctcttctgaccgggacagagtcaccatttgatttggaacagcagtggcaagatctcatgtccatcatggaaatgcaggccatggaagtgaacacatcagcaagtgaaatcctgtacagtgcccctcctggagacccactgagcaccaactacagccttgcccccaacactcccatcaatcagaatgtcagcctgcatcaggcgtccctggggggctgcagccaggacttcttactcttcagccccgaggtggaaagcctgcctgtggccagtagctccacgctgctcccgttggcccccagcaattctaccagcctcaactccaccttcggctccaccaacctgacagggctcttctttccaccccagctcaatggcacagccaatgacacagcaggcccagagctgcctgaccctttggggggtctgttagatgaagctatgttggatgagatcagccttatggacctggccattgaagaaggctttaaccctgtgcaggcctcccagctggaggaggaatttgactctgactcaggcctttccttagactcgagccatagcccttcttccctaagcagctctgaaggcagttcttcctcttcttcctcctcctcttcctcttcttcctctgcttcttcctctgcctcttcctccttttctgaggaaggtgcggttggctacagctctgactctgagaccctggatctggaagaggccgagggtgctgtgggctaccagcctgagtattccaagttctgccgcatgagctaccaggatccagctcagctctcatgcctgccctacctggagcacgtgggccacaaccacacatacaacatggcacccagtgccctggactcagccgacctgccaccacccagtgccctcaagaaaggcagcaaggagaagcaggctgacttcctggacaagcagatgagccgggatgagcaccgagcccgagccatgaagatccctttcaccaatgacaaaatcatcaacctgcctgtggaggagttcaatgaactgctgtccaaataccagttgagtgaagcccagctgagcctcatccgagacatccggcgccggggcaagaacaagatggcggcgcagaactgccgcaagcgcaagctggacaccatcctgaatctggagcgtgatgtggaggacctgcagcgtgacaaagcccggctgctgcgggagaaagtggagttcctgcgctccctgcgacagatgaagcagaaggtccagagcctgtaccaggaggtgtttgggcggctgcgagatgagaacggacgaccctactcgcccagtcagtatgcgctccagtacgccggggacggcagtgtcctcctcatcccccgcacgatggccgaccagcaggcccggcggcaggagaggaagccaaaggaccggagaaagtgagcctggggaagaagggggtttgaagcccaccaagaccgaaactggagaagggctggacctggacctggacctggacctacagcggggacttaaatgccttcttatccaatatatcttctcagatgggatgactgcgggtcagtgtacaggaagaggcaggcactggctggctcagctccactcgggtggagtggaagtggccagaccatttagacggacagggtcctcaccctacccctttcctgtgaggcaggggtggtggtggagttgctggaggtagaggagctatgtggagcaaaggccgacagaggggaaggaatggacctgtgagaggaagggaaggtggcagaaagtctcatttcaggaaggagggatagaaggaaggaaggaaggaacccccccccccccgaaaaaaaaatcaaagcgggaagaaaatcagagggaaggttaaggttggctctggccaggattccaggcagcaggttggagtgactggtgggcctagatcactggtgtgataaaccccaattttcaccccggggggggtggggtacacagacacagggtgggggtggggagggacggtgttaactctttctgctccttgcattttgacatccctgaaggggagctcttggatatcattggccatgtttcaatcgaatggagccactgggccccaacactggctttgagatttagagtcaaagggtagagtgaacaggaaagggtcacgtggtcccatgttgcaacagccccaacatcacgcatgtcattcactgccttgccactccatctccctccgtgctccagccacccctgagctgaggctcccattgtctccatcagagcctgcatgtgtatgccgtcctcccctggtccggtgtttgtgttccccacccctcacagactgcctgagctcttctgtaagctggggtagggtgatggcagtgctccgggaactgggcctgcagccttcctcttctgggactgctgtgaggcagaggaatgatggagaatctagtgtagcagcctccaggcaggattcagcacaacactggggagtcacccttccctcgggcctctgcctaccaacaactgggcttatcactgggaaaacacaaaaaattacacaacccagcaacaacaaaagaactagtcctcttagaatttcttgcgctttgatttttttagggcttgtgccctgtttcacttatagggtctagaatgcttgtgttgagtaaaaaggagatgcccaatattcaaagctgctaaatgttctctttgccataaagactccgtgtaactgtgtgaacacttgggatttttctcctctgtcccgaggtcgtcgtctgctttcttttttgggtttctttctagaagattgagaagtgcatatgacaggctgagagcacctccccaaacacacaagctctcagccacaggcagcttctccacagccccagcttcgcacaggctcctggagggctgcctgggggaggcagacatgggagtgccaaggtggccagatggttccaggactacaatgtctttatttttaactgtttgccactgctgccctcacccctgcccggctctggagtaccgtctgccccagacaagtgggagtgaaatgggggtggggggaagcactgattcccagttagggggtgcctaactgagcagtagggatagaaggtgtgaacctgggagtgcttttataaattattttccttgtagattttatttttaatttatctctgtgacctgccagggagaggggagagagagagagatgctgttgagcacatgacaaaataaaataaaatggatgattcattcttaagtgcactttttccccactttgaatttaaattgagaataaaggaaatggactcattgtaaaaaaaaaaaaaaaaaa

SEQ ID NO: 1838 - DNA, 316 bp, HOMO SAPIENS
tgcacacatgattactgggtcccactcccagagtttctgattcagtaggtctgggatgaggcccagtgatttgcctttcttacaagttgcccagtgatgctgatattgctagtgtgagatcacattttaagagccattgctctaggaagcctggagaaatacactcagaaaataggcaaaataaaggggcctaaacaataatcaggatcacaacctaagccctgccactggcctattttatcgaacctgcagtcactgctaacattgaacactgaatgctacagctcctgtgacagctgccacttaaggcagtctg

SEQ ID NO: 1839 - DNA, 232 bp, HOMO SAPIENS
tgtgcccagccgatgagctcatttagatggctgcatggggtcaccgcccctgcacgcgtggcacccaacttcttccagtcgaatcctgcttcttggtgccctgatatggcagaatgcccccagacaccacccctactccagcccctgaaataaaccactccagacaattttatttttccaattaaatcttttctttttttttatgaaaaaagatcacacagaatttgccaac

SEQ ID NO: 1840 - DNA, 3986 bp, HOMO SAPIENS
gagcctgcggcgtgcagtgtgaggggcgggacccggctgccggcggtgggtctagctgggggaggtcgggccatgctggtgggccagggcgcggggctgctggggcccgcggtggtcaccgccgcggtggtgctgctgctgagcggcgtggggccggcgcacggctcggaggacatcgtggtgggctgcggtggcttcgtcaagtcggacgtggagatcaactactcgctcatcgagataaagctgtacaccaagcatgggactttgaaataccagacagactgtgcccctaataatggttactttatgatccctttgtatgataagggggatttcattctgaagattgagcctcccctagggtggagttttgagccgacgaccgtggagctccatgtggatggagtcagtgacatctgcacaaagggtggggacatcaactttgtcttcactgggttctctgtgaatggcaaggtcctcagcaaagggcagcccctgggtcctgcgggagttcaggtgtctctgagaaacactgggaccgaagcaaagatccagtccacagttacacagcctggcggaaagtttgcattttttaaagttctgcctggagattatgaaatcctcgcaactcatccaacctgggcgttgaaagaggcaagcaccacagtgcgtgtaaccaactccaatgccaatgcggccagtcccctcatagttgctggctacaatgtgtctggctctgtccgaagtgatggggagcccatgaaaggggtgaagtttcttctcttttcttctttagtaactaaagaggatgtcctgggctgcaatgtctcaccagtgcctgggttccagccccaagacgagagtctggtgtatttgtgctacacggtctccagagaagatggctcgttctctttctattccttgccaagtgggggctacactgtgattccgttctatcgaggggagaggattacctttgatgtggcgccttccagacttgacttcacagtggagcatgacagcttgaaaatcgagcccgtgttccacgtcatgggattctccgtcaccgggagggtcttgaacggacccgaaggagatggtgttccagaagcagtagtcaccctgaataaccaaatcaaagttaaaacaaaagctgatggctcattccgccttgagaacataaccacagggacatacaccatccatgctcagaaagagcacctctactttgaaacggtcaccatcaaaattgcaccgaacacacctcagctggctgacattgttgcaacagggttcagtgtctgtggtcggatatcaatcattcgcttcccggacaccgtcaagcagatgaataaatacaaagttgtcctgtcatctcaagacaaggacaagtctttggtcaccgtggagacagatgctcatggatcattttgttttaaagcaaaaccagggacttacaaagtgcaggtgatggttcctgaggcagaaaccagagcagggctgacgttgaaaccccagacatttcctcttactgtgaccgacaggcccgtgatggatgtggcctttgtacagttcttggcatcagtttctgggaaagtctcttgtttggacacctgtggtgacttgctggtgactctacagtccctgagccgccagggtgagaagcggagcctccagctctccggcaaggtcaacgccatgactttcacctttgacaacgtgctccctggaaaatacaaaataagcatcatgcatgaggattggtgctggaagaacaagagcctggaggtggaagtgctggaggatgacgtgtctgcagttgagttcaggcagacgggctacatgctgagatgttccctgtctcacgccatcactctggaattttatcaggatggaaatgggcgtgagaatgtggggatttataacctctccaaaggagtcaaccgattctgcctgtccaagcctggtgtgtacaaagtgacccctcgctcctgccaccggtttgagcaagcgttctacacctatgacacgtcttcacctagtatcttgacattgacagccattcgccaccatgtccttggaactatcaccaccgacaaaatgatggatgtcactgtgactatcaagtcttccatcgacagtgaacccgccttggtcttaggccctctgaagtctgtgcaggagctgcggagggagcagcagctggctgagatcgaggcccgcaggcaggagagggagaaaaacggcaatgaggaaggtgaagaaagaatgaccaagcctcccgtgcaggagatggtagatgagttacaaggccccttctcgtatgatttctcttactgggcgcggtctggagagaaaatcactgttacaccgtcatctaaagagctgctcttttatcccccttcaatggaagccgttgtcagtggagaaagctgcccagggaagctgatcgagatccacgggaaggcaggcctgtttttagaaggccagatccaccccgagttggaaggagtcgagattgtcatcagtgaaaagggggcaagttcaccgctgatcacagtctttactgatgacaaaggtgcctacagtgttggccccctgcacagtgacctggagtacacggtgacctcacagaaggagggctatgttctgactgcagtggaaggaaccatcggagacttcaaggcctatgccctggcaggcgtaagctttgagataaaagctgaggatgaccagcccctcccgggagtcctcttatccctgagtggtggcctgtttcgttccaacctcttgacccaggacaacggcattctgacattctcaaacctgagccctggccagtattacttcaaacccatgatgaaggagttccggtttgagccatcctcacagatgatcgaggtgcaggaaggccagaacctgaagatcaccatcacggggtaccgaaccgcttacagttgctatggcacagtgtcttccttaaacggagagcccgaacaaggggttgccatggaagcggtgggccagaacgactgcagcatttacggagaagacaccgtgacagacgaagagggcaagttcagattacgtggattgctgccgggatgtgtgtaccacgttcagctcaaggcagaaggcaacgaccacattgagcgggcgctcccccaccatagggtgattgaggttgggaataatgacatcgatgatgtaaacatcatagttttccggcagattaatcaatttgatttaagtggaaatgtgatcacttcctctgaataccttcctacgttatgggtcaagctttacaaaagcgaaaacctcgacaatccaatccagacagtttcccttggccagtccctgttcttccatttccccccactgctcagagatggcgagaactatgttgtgcttctggactccacactccccagatcccagtatgactacatcttgcctcaagtttctttcaccgcagtgggctaccataaacacatcaccttgatttttaatcccacgaggaagctgcctgaacaggacatcgcacaaggatcctacattgccctgccattgacgctgctggttctgctggccggttacaaccatgacaagctcattcctttgctgctgcagttgacaagccggctacagggagtcggcgcgctcggccaggcagcctctgacaatagcggcccagaagatgcaaagagacaagccaagaaacagaagacaaggcggacccttcgtttgcaagaagagttccagttgatgtggtgtttggttccatggcggggtaccctagggattcatctgttttcttcacttccctttgcatctgagatcctgctggaaaccacggcaacctgtatccactattaggaggtaaaaatcaataaaatggcccattcatttgtgttgtagctcaaaaaaaaaaaaaaaaaaaaaaaaaaaaaaaaaaaaaaaaaaaaaaaaaaaaaaaaaaaaaaaaa

SEQ ID NO: 1841 - DNA, 9727 bp, HOMO SAPIENS; identical to SEQ ID NO: 80

SEQ ID NO: 1842 - DNA, 3027 bp, HOMO SAPIENS
atggttgtggcaaagggctgcaaagacaaagagcagagcccactctatcaaatgctagcagcccaatacctgccctggagagcctctgtaatcaaggaagccaggcaagtcctgaatgaagcagcaatcagcagcgcactgcatcgccaggcctgtggcattcccatggaatccacatactttcggggcctaaggaaatcaacagtgtcaattaaaaaccatctcattttaaaaacgaggaaatatatgccctgcaaagatcttaagggaaaaaaaagcgacgacccccgagtctggggaccccaagtcccagcggcctggcgggcgcacggctaccctcagggtcagggcgcgcgctcccgttgggaccgggggcgcgccgaggccgcagcgcagggcccggcccgactagcgagcgataggcgggcgccggggggctctgtccggcggggaacccgagagccgcgggcagggaaccggaaagcgagagagcccggctccgcggctgctcctgcgcttgagcccagagctcacaggggaacacgcgtcggccggaaagcagcgccgggaagaagcgtgggcgcgagggggcaagggcacgggtcccggcgtcccgcggaggtcgcctcaccaggcgaggcgcggacgcccgagccgccccgggccacacgtcggcccaccctccgagaacccagcccggtcgcggcggggaaaggggccggcgccaccaggccgccgcctccaggcgcgatgaatcgtgctttttcccagtgcgtagtccaggcctggccgccccggcccgtccggggtgactcagggcccggccccgctcgctcctctgccaccttcggcgtcctccgcccacgagtcccccggcccggccgccattctgcccggccgcgtttcggcggctcaggcctcgccaggcgcctggtttcggccgtcgcggcccgagtcactgcgacaccgcggctcggggccgggcctgcgccgccgccgccgccgccacctcctctcggccccggcggctgccgacactcacccgcatctctgtggtgccccaaaggctcccgcgacgcctccgcctggtccctgggcctgggccccggcgaaagccccgtcccgccaaggtctagctgcgtccctcagctaccggggctgccccgcctggagctgcgtgcgacacggcgcccgcctcctcctcctcccctgcccgcccggccctcctcctcccgccgccgccgcctgcaccacgcaacctccgccctctcgccttccctgcgcggctccccgccctctcggcctcaccggctccggcgaccgcgggggagaagctgttgggggagggccggaacgcaccgccatcggcgtccggggcgggggagccgggaaaccgtcgtcgccatcgccccgccagcccgaggcgcgggaggggcccggaaagctccctcccgcccgctcgccgctgccggcggccccgggggcgccccttccgcggccgaggcccccgctcgcgtggggaagcttctacctgcgagcctgcggcccctgcccccggcacccgagacatccccgacccggcgcgccggattctctgccaggttttacagcctccctcgccttgggaccgccgcggaggacccgttcccgccacttcggacctcgcgagcggggctgagctgcttgggtcggggacaccaccagcctctggagaaacggcccgaagcaccccgaagaagagggggtcccagtcccctgcccctcccttgtgcgcacccccacccccagcttgcctggaacctgactccacacctttgtcgaccgggacagggactgggggttgcaccccagatcagaaagtcagaggtggccctccgaatcggcgcggacttccgaggaacctcagccaattctcgacccccttaccacctgcaaggccttaggaatcggctccagaaagctcgagcttatctgcgtgtttcgttttaaaaatcacttctaagataaaacctaactaggctttccccttcagactttcagtaactcctgtttggcaaattttgacattcactctatccttcgtctttgtaaggacatatcaagacttagaaggctttgattacacatacggatggcatgagtcgtgatataaaatagtattgttttcacgtgtacttcgaagtcatctcatttgaaattaactgtcataattgactatttggaatattcaacctaaatactacccgctgctgtggtgacggggggtggaggaagcgtggtggaaccccaacacctagtgaggggtggctgattaataccacggctcacaacataacagagcggctcattccatgaacaaccccggggggatttcgaattctatcatctgggcaaaagatgtgatgagtgtaacttcctgttttctccaaactaaaacactacgcagattcctgtaccgctctgggacagaaatcctcagccagagcagaggccgtccccagagtccacactgtttcctgcataaagtgggttatctcagaagaaacatcccactggtctgtgtgatccttctattgaaatgtggtcttttatctacatctaagtatctctagaagtaatgcgtttgtatgtacttgtcactcagatatgtaatcccttaatttgtgcggggttttggggtgtgaaaaattcttggtttatatcctacacttttaaataacctcgtcaaaacttacatgtatttaacacctttttttgtgagcacatggtaaggttggaagtaaaaatggaaggtttatccctgtggcccatgttttccagtgtacctatgtggggttttaaaaaaatgtcccaatttcttccttttactggagactgcgttttttagacaacagcttatcttcctattccctaaccagtcttctccaatcttaccattcaatatagcctccttttctgtgacttcctccagctgaatagaagggctgagtgggtcaaccttccctgtattgtttgtttcctccaccc

SEQ ID NO: 1843 - DNA, 3588 bp, HOMO SAPIENS
gcagcagcagagaatccaaaccctaaagctgatatcacaaagtaccatttctccaagttgggggctcagaggggagtcatcatgagcgatgttaccattgtgaaagaaggttgggttcagaagaggggagaatatataaaaaactggaggccaagatacttccttttgaagacagatggctcattcataggatataaagagaaacctcaagatgtggatttaccttatcccctcaacaacttttcagtggcaaaatgccagttaatgaaaacagaacgaccaaagccaaacacatttataatcagatgtctccagtggactactgttatagagagaacatttcatgtagatactccagaggaaagggaagaatggacagaagctatccaggctgtagcagacagactgcagaggcaagaagaggagagaatgaattgtagtccaacttcacaaattgataatataggagaggaagagatggatgcctctacaacccatcataaaagaaagacaatgaatgattttgactatttgaaactactaggtaaaggcacttttgggaaagttattttggttcgagagaaggcaagtggaaaatactatgctatgaagattctgaagaaagaagtcattattgcaaaggatgaagtggcacacactctaactgaaagcagagtattaaagaacactagacatccctttttaacatccttgaaatattccttccagacaaaagaccgtttgtgttttgtgatggaatatgttaatgggggcgagctgtttttccatttgtcgagagagcgggtgttctctgaggaccgcacacgtttctatggtgcagaaattgtctctgccttggactatctacattccggaaagattgtgtaccgtgatctcaagttggagaatctaatgctggacaaagatggccacataaaaattacagattttggactttgcaaagaagggatcacagatgcagccaccatgaagacattctgtggcactccagaatatctggcaccagaggtgttagaagataatgactatggccgagcagtagactggtggggcctaggggttgtcatgtatgaaatgatgtgtgggaggttacctttctacaaccaggaccatgagaaactttttgaattaatattaatggaagacattaaatttcctcgaacactctcttcagatgcaaaatcattgctttcagggctcttgataaaggatccaaataaacgccttggtggaggaccagatgatgcaaaagaaattatgagacacagtttcttctctggagtaaactggcaagatgtatatgataaaaagcttgtacctccttttaaacctcaagtaacatctgagacagatactagatattttgatgaagaatttacagctcagactattacaataacaccacctgaaaaatatgatgaggatggtatggactgcatggacaatgagaggcggccgcatttccctcaattttcctactctgcaagtggacgagaataagtctctttcattctgctacttcactgtcatcttcaatttattactgaaaatgattcctggacatcaccagtcctagctcttacacatagcaggggcaccttccgacatcccagaccagccaagggtcctcacccctcgccacctttcaccctcatgaaaacacacatacacgcaaatacactccagtttttgtttttgcatgaaattgtatctcagtctaaggtctcatgctgttgctgctactgtcttactattatagcaactttaagaagtaattttccaacctttggaagtcatgagcccaccattgttcatttgtgcaccaattatcatcttttgatcttttagtttttccctcagtgaaggctaaatgagatacactgattctaggtacattttttaactttctagaagagaaaaactaactagactaagaagatttagtttataaattcagaacaagcaattgtggaagggtggtggcgtgcatatgtaaagcacatcagatccgtgcgtgaagtaggcatatatcactaagctgtggctggaattgattaggaagcatttggtagaaggactgaacaactgttgggatatatatatatatatataattttttttttttaaattcctggtggatactgtagaagaagcccatatcacatgtggatgtcgagacttcacgggcaatcatgagcaagtgaacactgttctaccaagaactgaaggcatatgcacagtcaaggtcacttaaagggtcttatgaaacaatttgagccagagagcatctttcccctgtgcttggaaaccttttttccttcttgacatttatcacctctgatggctgaagaatgtagacaggtataatgatactgcttttcaccaaaatttctacaccaaggtaaacaggtgtttgccttatttaattttttactttcagttctacgtgaattagctttttctcagatgttgaaactttgaatgtccttttatgattttgtttatattgcagtagtatttattttttagtgatgagaattgtatgtcatgttagcaaacgcagctccaacttatataaaatagacttactgcagttacttttgacccatgtgcaaggattgtacacgctgatgagaatcatgcactttttctcctctgttaaaaaaaatgataaggctctgaaatggaatatattggttagaatttggctttgggagaagagatgctgccatttaaccccttggtactgaaaatgagaaaatccccaactatgcatgccaaggggttaatgaaacaaatagctgttgacgtttgctcatttaagaatttgaaacgttatgatgacctggcaacaaaaagtaatgaagaaaattgagacctgagtgaagataagaaatgatctttacgtggcaaaatgaacacatcttgagtatttaggaaatgggcagtgaaggctaagaacctggtgtgtttcttgggatcatggtacatttatcactgaattaagccatcagggaaaaaacaacaaaaaaagagaacacctccagcttttctttttctgtatatactcatgtcccccagattccaacatttctcactgaaagggggcatgtatgcaaacctcatctttctccttcattaatgatgatcttcagattaaaccctttggtgctaggagctgacaatttccaaagcagcctgtgaagtcctaggggctgggggccactcttgcggcaagcagaaggccatcctactccgcggagtgatcatggaaatgtattttagttaaactctgacagctcccaaacggaagactacagcatgacgtagtattatgattgcattgtatgaaagagcaagtgactttctaagtaggatgaatcatattcatatgcagatgtcttagcctcttgacgctggaagtgtggatttatagctatgaaaccactgctggcagtgggtgggccactgggactgacgggggttaaagggcattttactaaggcagctaagacatattcagacatcaacgttatccttctttttcatatttctacctgagtgaag

SEQ ID NO: 1844 - DNA, 7504 bp, HOMO SAPIENS
gcgctcggggccctccgcctagtagagatctggagccagaagcccagagacagccgagtgcgccgtgcggtctccggacgctcgctgctcagcccgatccccgccaactgtgcaggcggctgacccgcagcggcagcggcagcagcgaggactcgagcgctggctgcagcgacaccatggatctctcctttatggccgcgcagctgcccatgatggggggagctttcatggactcgcccaacgaggacttcagcaccgagtactccctgtttaactcctctgccaatgtccacgcggctgccaatggccagggccagccggaagatcctcctcggtcctccaacgacgccgtcttgctatggattgccatcatagctacgctggggaacatcgtggtggtgggcgtggtgtatgccttcaccttctgaggacggcacaccctgcaccaccatggggtgaggcttggcacgtagctctgacttgctgtcggcctttggcttctcctgtgttctagaaccaggagttttgaccaggggcggcggccgtccttctggaatttctccccagcagccctgatttcaaatatcccatgttgtggtcaagctgagtcagaagacatggaagtatgggcctcctgcccctagaggcatgacggggcaaggccttcagagggcagattggggatccttgaaactacattccaggaacatgggaccagatgagacagctagttaagtttaaaacatagacatgatttgatgatcgcttgctggtggtaaataatcactcgtgtgtcttgtttttatgcaaacttatcgaacctagggcgtggggtgctggggcaagagcagccctcagaacttcagtgttcctgacccaattctggtttcacattcagtcccttggccatctagtagggccattggatgttcctagtttgactttgaaatggcacctttgccaccagacacctggtcccttccaagacccaagtgcattgggagacccagggatggggggttactggtaataggtggggtttctgggggtgttgttggtggtttttatctcctggtcggactttctcttctttttaagaagaggagaggatgtctttaagagctagatgtgccaggcagtggactcttcaggccacccacgtgagaatgctgtttcttctctgaggaatcgtggaattttaaagatgaacaagattcacatccactgaattattcaacggatgggtcagaaaggggggtgatttgcctgtggtcaccaggcaggtttgtggaggagtcggaacagaaagatgtgtcctcactctcagctcactgagctctctgccccaactaagcacttccctgaggaggttgctgagaagctgccctcaggagaatgtccaggcatcttgaaggtgggtgcgagattggcaggctgctcagatacccgtcctttacattcagtgtggataccgtgcattctcctgaagctgtgaaagtgcttctgcccaagccacttccttaaattctgaaatatcagcatctggggtcctggcaagcaaggaagcttccaagtaaaaaccagagagaagggcacacttttctttcttcattaggaaatcttattgcacaggaaccacccccacccccaccccccacaccttcccaaggcagcatcccagtgcagatagagtgggaaaggtcccagaagggggctcactcacctctaggcccagagaggctttctcctcactttatacactgcaaaaacagaagaattgtgtcaataacaccctctgtagtggagaaacttaaaaagctggttaggaagctctcgtgtatatttagagacaattacaagaaagctggacttgccgctgtggtctcaggagaaatgagtgttcttgatgacaggcaaagggacatcttagttgtccagaagcggcactcttccctggaagccgccatgttaataggattactagcctggctccagacagtgcctgctcatggctgccagttcttaccgatcacatctgtcactgccaccgtatatcatctgccagtgcatcagcttaaggggaggtcacgagtgcaaaagaacctgacccttgacaatgagggagaagggacatggaccacctgtctggaattcctggaatcactggcagggtggaggctgggctggggagttagccgcggtgtgcgtgaatggctctgtctccagcaagtctctctccatcaaaccccaggtctgccccataagcaagatctttaacagatggatgtctccatgagaaaacccaaggcgagaagcccagagccatggcggggttgcttgacgtcctcatggagtcactctgccccacatgctcaaatcttccctctggccccacatccctaggagggcctgacccctgtaaagatacaggaggcagctccctggcctccaaatggcccatggagatggcagtcgggagacagggttctgtgtttgctgcggtgaagggaggagaaggcaggaggaaaaaggatggcttctagccctgaagaggactccagcatcccaggcaccgggtgcttctggctgcagttttccctatggaggcccctcagcctccagccctaacataaatgtcggttaaattcagttttcaagcctctctcccttttcagtgtcagagcagtagatggtccagggcattggaggcctcgaccactctgcattgcagattacagtgacttcctcggggttgccccatcttggtctcctgtggtttcttcatcagctttttttttaccagcatctctcaaataacaatgaagatagatatgcccattagtgtctgattaaggagcaaaggctggatttctggccacagcgagctgcactctccctcctgcctcagccggggtccgtcttagcagtttggaaaggggaaaaagatgccggtcctcactgcttaagttttgtgtccaggtgccactagacttgcatgcacactaactccttacaatcaccacacagcatcatcgccccagtgcacagatgaggaaccagaggctcagaggagtgaagttgccttcctgaggtcacacagcatgaaagtgatgagctaggatttgaatctgggaagttgggctctagagccagactgtactgccttctgccacactgtactgccttctgtgactgggtggcacctccagggcacatttacacaaggccctgaatctgcagaggctgtttctcaagatgcccgtcatggtgtggcctgggccagctctggcttccacaggtccctgactgtcctcagagtggaacatgctcaacctcccgcccactgctctctctctgcccagatttcaggggtgccggtccccaaggcctgcccccttctttaagactgaactcaagtctccttggaaggccccggtgaagctcccagagactggttttcttgggatgcaggcagaaggggaccctccctggccaacacccaggagcccagcagaagcacccacacgtagaaagaggctcactacagccagaagtgcagagtcagagtcctgggaccatcttgttctgcaaggtgaccccaggctccccaggacaggggagagggatcgtcctcattcagactctagctggggcctctgtactggcttctccctgggtggggttgcctgttacatagctgtgcctcagagaaagggtcctgcattttctggaatgttctctgtgcttacccctctgtgtgcccctccattgctcctctacaagcaattaggtgattcaaaagagcaacttaggctgggtgcagtgactcacacccgtaatcccggcactttgggaggccgaggcgggcagggacaggagttcaagaccagcctggccaacatggtgaaaccctgtctctacaaaaaatacaaaaattaaccagacattgtggcatgtgcctgtaatcccagctactcaggaggctgacacaggagaattgcttgaaccaggaggcggaggctgcagtgagctgagattgtgccactgcactccagcctgggcaacagaacgagactctgtctcaaaaaaaaaaaaaaagaaaagaaaaaaaaaaagagcaacttactgctttgtgaggttgtgagtggccaccactgaaggtctttgagaagaggccagacgccgctgtagccaggcctgtcttaagaggacttgtgcttccagggacccaggcaggatgatggcgcagctcttcctactccaagccaatgctgtccttcccctttcccatgaaatcaaggtcaagaggcaaataagactccctgctccactctaccccccagagagaaatgattctcgctcctttcagatcccccaggatctgagggagaaaggatgggaggaggggcagcagcatttcgctggaaaggcagcagatgcttttccagccccggttcagctggaaggcttggaggctggccagaccactctggcgtctcctgaagtgggtccctggagaccgaagaggctcagtggagtctgtctgttgtcagcactgctgcctgatccctgcaagacaaatggcactttccttcttcagaagcatcatctgccttcattattagcagtaatattattcccagttattattcttaccggtgccagttttgcacatctttttgttgctctatttgtgtctcatttacttctcaaattgcccctgggggcaggaatgaggatgcagagagatgcacgttaattactgtcgcatttttctgtggagaaaactgaggccagggctgaacgctcacagctaaggagctgtgattcagacccagttctgtcagctctagaggcaccctgcatcatgcccaccagggtgatccccctgggatggaccatctcgggatatgaggcctcggaggctggggttgagatttggtcctgaagagcttatagccagattgccacattcaagtgtaagtccaggaaaggggcaggcggcagtgcacagggatttatcagttccagaacctcacagtgataagaggctttagagagcatctaatcgagacctttaatttttcggggagagcagctgaggccgtgtggaaaattagtggagagctgacaagtgtctgggctcctggcccaggggtccgtggtccagcacgttgtgcgttcagtgggaagcaaagggcttgcccgggattacctgccccagccccgaggtgggttgtgctccctgcagctgccatcggcccgctttgcttcgtcctggcagatgcccagtgattgtccccgagcaagtgccagggttgggctgagctgctatgacagggaggcccagggagttctgctcagggagccaaagggaacagccagatcctgaatgttctatgttcacctgccccagccccacccaccctggcccactccacaggcccctgaccatggtcactcacggagagggatggaggagaaggtggttgaactgagtactgagaacccagaggacagagcccacagcttccaagcaggaaaagggacctctctgaaaaatctggataaccagaattatcacagcaccttctcattcccagcgcgtccttctgagctcagaccttgagcatttactgggtttctttttgaggaagagggaaagtgacaaaggacaaaacaatgcaaatcttcatgactgaagacgatcaaagactccctggagcgagaaaacagttactgccagaagcagaatggaagagccaaaaagtacacaaaatggacgccataaattctgaaataaaagtgtatgatgtgttctgagtcactgtagaagtcatgcatttattatcaagatagaaaagagcagagaatgacgtggacattggtcctcggagaggctgcgtaggtggtgcggtccccgggggattctggatgctggtcttttgaccgtggcggcagcctcgcgcctgcccggatggctccatccagacatttggcaaggctgtcatctgctcttgggtcctttttcaagctgatttcctgcctccccaagaggaggtttgagccccattctgccttggaaataaatcctgacagatgtgcacagcatatttgcagggaatttgcaggcctcgattattgggggaatcagagcccattccacaccgagccccatccacgtggctgagcaacacccctgtgtcccctgtatctgtctcactggctgtctttctcccagtttcttaaagaaccacaccattactgcgtttgccgttcgaagcgttgtcccaacaatgcagatggttctgacaagggctctatatgctggcagaagggagcttccaaccttttaacttgaggaaaatgaatctctgagaggcttgagagtgttgccaggtggagcttttcaggagacaggggtcttgagcccaggacacctaactatcgagttttcactaggagacttagtggtggctttcatgaggccagtcgttctcaaggaagggctgggggccatcagcaatgtctggagacatttttgattctcacagcttggtggggactgctattggtatctcatgggtggaggccagggatgccaccgaacatcctacaatgcacagggcagccccccacaaataagaattatccagccccaaaatgccaatagtgccgaggtcaggggaccctgtgctggccatcctatctctgattctgaaactatgcatgctttccacttttccccatttgtgagtcattgagtaaattaaagctcttctgagcagcagcagtgatcatggtcactgccctgcgttcaaataatgcgagctgaggacagtgatctgcaactcccagcatgtcatgtggtctcttagaaatccatgtgactgtttccaccatcttgggcatttgtggggacccccagactggagggagaaagccctacaaagtggatgggagtgtggggctgaacttttccctacccttaactttgtgtctctgggacctccagggacctggcccctcaccaatgcatatgaagagtatgcttggggaagagcttaggaatggggtgggcatgggagtgctgggtagcagcctttgagcaaatctgcatcttctcttatttctgacctttttccacgtgcccagtcctatttctgccagttgaaggcatactaatattctttatactatttaatcttttgcagaaaccttactattataacttgctactctccagataccaattcttcatgccgagagcatcggaaatgtttttgtgtcttactgatgttttcatgatcaacttgtaaatgtaagcagttgacttcataaaaggtattttaactattcttggagtcctttgctacccaagcacctggtttcaccatgcgatcactgacttctctacagtgaagactctttcttaataaaggatttcgctgtgctcttttgattaaaaatatctaaccttaaaagacgtaaaaaaaaaaaaaaa

SEQ ID NO: 1845 - DNA, 1831 bp, HOMO SAPIENS
gggctcttcctcgcggaagtggggaggaggcggttgcggttagtggaccgggaccggtaggggtgctgttgccatcatggctgaccccgacccccggtaccctcgctcctcgatcgaggacgacttcaactatggcagcagcgtggcctccgccaccgtgcacatccgaatggcctttctgagaaaagtctacagcattctttctctgcaggttctcttaactacagtgacttcaacagtttttttatactttgagtctgtacggacatttgtacatgagagtcctgccttaattttgctgtttgccctcggatctctgggtttgatttttgcgttgattttaaacagacataagtatccccttaacctgtacctactttttggatttacgctgttggaagctctgactgtggcagttgttgttactttctatgatgtatatattattctgcaagctttcatactgactactacagtattttttggtttgactgtgtatactctacaatctaagaaggatttcagcaaatttggagcagggctgtttgctcttttgtggatattgtgcctgtcaggattcttgaagttttttttttatagtgagataatggagttggtcttagccgctgcaggagcccttcttttctgtggattcatcatctatgacacacactcactgatgcataaactgtcacctgaagagtacgtattagctgccatcagcctctacttggatatcatcaatctattcctgcacctgttacggtttctggaagcagttaataaaaagtaattaaaagtatctcagctcaactgaagaacaacaaaaaaaatttaacgagaaaaaaggattaaagtaattggaagcagtatatagaaactgtttcattaagtaataaagtttgaaacaatgattaaatactgttacaatctttatttgtatcatatgtaattttgagagctttaaaatcttactattctttatgatacctcatttctaaatccttgatttaggatctcagttaagagctatcaaaattctattaaaaatgcttttctggctgggcacagtggctcacgcctgtaatcccaccactttgggagaccgaggcaggtggatcacgaggtcaagaggttgagaccatcctggccaacatggtgaaaccccgtctctactaaaaatacaaaaattagctggatgtggtggcacacacctgtagtcccagctagtcaagaggctgaggccagagaatcgcttgaacctgggaggtggaggttgcattgagccaagatcacgccactgcattccagcctggtgacagagcgagactcagtctcaaaaaaaaaaaaaaaatttttcttcctaaattagccacgcatagcggttcgtttgcaattcaaaaataattttatgagtagataagaatatcagtttaccgttgtctagtgattttatctaaattttccctgaattattaagtaatattgatttggctttgattctgaagtagtagagtctttaccattataaactgtaaatctctttttgcttaaaaggaaaaaaatgtaaaagataaattccacagagaattattcagtattacattaaaatgttaatgactttttattttaaattgtactaacattaaaagttggcctgaaagtcagatattatgacaaaatttgacattaattgtttttaaagtatagatttcatttgaaattatagaatggtaatgtggttagaggacaccaaagatactgggtcatcagccattaagtatatctatttcaaaattaaaatatttgggaagtaaaaaaaaaaaaaaaa

SEQ ID NO: 1846 - DNA, 334 bp, HOMO SAPIENS
ttgtgaagaaccggaccctccaaatctttaaaagtcaaagcttgaaacgagttttatgaccaccatgaaaaacttgtcaccggcatatgtgaaagatcagcctagtccaccctcaagttttgacaagaacaagtaggcctcatgagggatggatattggccattggtagaagagattttattctagaaaaacatcttgctattgtttcaggttggttgtcctgaagtgtttaagacactgtcaagcttaagatgatgcaggggaaaagttaaactgtgaaataaaacattttaaataatttctgacataaaatgaaaatacactccttggaaag

SEQ ID NO: 1847 - DNA, 2904 bp, HOMO SAPIENS
agtgcgagccggggagagtcgaacccggagcagggtcccatccgagcgtggactggcggcaggatgttcagctggatggggcggcaggcgggcgggcgcgaacgcgctggcggcgcggacgcggtgcagacggtgacgggcgggctgcgctcgctctacctgcgcaaggtgctgccgctggaggaggcgtaccgcttccacgagttccactcgcctgcgctggaggacgccgacttcgagaacaagcccatgatcctgctggtgggccagtacagcaccggcaagaccaccttcatcagatacctactggagcaggatttcccaggcatgaggattggtccggagcccaccacagactccttcatcgccgtgatgtatggagagactgagggcagcaccccagggaatgctttagtcgtggaccccaaaaagccgtttagaaagctcagtcgctttggaaacgctttcctgaatcgattcatgtgctcacagctccccaatcaggtcctgaagagcatcagcgtcatcgacagccccggcatcctttctggggagaagcagcgcatcagccgaggctatgacttctgccaggtcctgcagtggtttgccgagagggtggacaggatcatcctgctctttgacgctcacaagctggacatctcagatgaattctcagaggccatcaaggccttccggggccaggacgacaagatccgtgtcgtgctgaacaaggccgaccaagtggacacgcagcagctgatgcgggtctacggggccctcatgtggtccctaggcaaggtcatcaacacgcccgaggtactgcgcgtctacattggctccttctgggcgcagcccctgcagaacacggacaaccgccggctcttcgaggctgaggcccaggacctctttagagacatccagagcctcccccagaaggcagcggtgcgcaagctcaacgacctcatcaagcgagcgaggctggccaaggtgcatgcctacatcatcagctacctgaagaaggagatgccaagtgtatttggaaaggaaaacaagaagagagagcttatcagcaggctaccggaaatctacattcagctacagcgagaataccagatttctgcaggggacttccctgaggtcaaggctatgcaggaacagcttgagaactatgacttcaccaaattccactcgctgaagcccaagctgatcgaggcagtggacaacatgctgagcaacaagatctcgcccctcatgaacctcatcagccaggaggagacgagcacgcccacgcagctggtgcagggcggcgccttcgatggcaccaccgagggccccttcaaccagggctacggggagggtgccaaggagggcgccgacgaggaggagtgggtcgtggccaaagacaagcccgtctacgacgagctcttctacactctgtcgcccatcaatggcaagatatcaggtgtcaacgccaagaaggagatggtgacctccaagctgcccaacagcgtcctgggcaagatctggaagctggccgactgcgactgcgacggcatgcttgatgaggaggagttcgcgctggccaagcacctcatcaagatcaagctcgacggctacgagctgcccagcagcctgcccccccacctcgtgcccccctcgcacaggaagtccctgcccaaggccgactgaggggtgggctgcagaacggggtgggaactgggggacctgggcctcaggcctgctccaccactgactcaccgaatgaccttgggcaaggcactgccctctctgtgccttggtttccccatctgtagaatggggagggtggacactggaaactagatgacttctttcacctccaaaattcccttagtttctatgaaaatattgggggtaggggggtggattaggagattgaagggttgagaagaaagagaaattgtccaaagagtcctcagaacctgcctggagaaatgcgcatgggggtgggcctggtaagtcccaggaaccacaggaagtgagctaaggctcacccagagcagctgggtctccaggctgcctgggctttttgtcctcatgaacaactctggagcagctgtctgtccctcagagggcacctggaggcagcaaagattatcttatttattttattttgttttctgctatatttagagtggcaaaaaaatagagcagagggtttctgctgtctccagactgtctaccaaagagaaggcgacagatgcctcctgggtttggaagggggatgcactgtggatctgccatccattctgcagtctccagcagagcaggcagtcaggccccagcgtgcctccatcccagtgccccgatgaccatctggtcagccctcccaacctcccttccagggggcttaccagcaaagccatattcggctaggaatttggaattcacaacctttattaacccctggcaaaacttcccgtttgcatgtcaaatcacattgaagcctgaaaattagcttttcttactggtttttccaataagtaatagcaaagcccacttatcatacttaaactacagtaaagaaaagaggtggttctctgcagtgatcgtttagtgtggccctcaaacattaaatatcccgaggtctccttggtgggtggcaggatttaaattcaatcaaatcctgtcctagtgtgtgcagtgtcttcggccctgtggacacaggtgaatgagggaccagccctgccctgggctgttgagaagagatcagtccacccagagttagacattgtttttgtagaaaacaggcatttattatgtctagggttttgtgttttttttttttccttacaggataaaagcctttatacagaaacaaaatggaacctttcatataaaaccttttctttaaaaaaaaaaaaa

SEQ ID NO: 1848 - DNA, 5217 bp, HOMO SAPIENS; identical to SEQ ID NO: 1570

SEQ ID NO: 1849 - DNA, 398 bp, HOMO SAPIENS
  misc_feature (70)..(70): n is a, c, g, or t
cctacagctttgtccattgacatgtctgcagagcacaatgacagtgactgttccccagaccttaccatcngggctattaccaaacttttcagtccttgcttataagacttttttatttttttgcttgaatttgcaagtttttaattatcagtgaggttgagtatgtctcatatgcttgtgaccaagtgtattctttttttctgaagtaacattcatatccttcatcatttttccacttttttttatctcattgattgaaaagtttctttgataaggtcctttgcatattgagaacaaaggtcaccattgtttctatgggtgaagaggcctcaagcttagtggggtgggcacttaagaagtgtgaacatttatgcgctttgacccacttgcaataattt

SEQ ID NO: 1850 - DNA, 1578 bp, HOMO SAPIENS
acttccggggcggtggtgagaacgaggctcacttccgtccgtggggggagctgcggcggtggcggtgcaggaggccgggcaggggtgcggagggaccgacggacgcacgggcgggcggccgggagccatggagcgcggccctggggcccgggggcgcgggccggggtgggcttcccacggcacgacatggagacctgtggttgcgaggctccctggggctcggcttggaccgcgatggggctgggccctggcctcctaacggggctgctgtctggggcggtagctgggggggcgctctcccccctgcccgcgactcggagcacccccacccctcccctgccgggccaggccgggcggcgttgttggcgggggccccggtggaggcccggcctgggcggcgcccgccatgaatgggctgtcgctgagtgagctctgctgcctcttctgctgcccgccctgccccggccgcatcgctgccaagctcgccttcctgccgccggaggccacctactccctggtgcctgagcccgagccggggcctggtggggccggggccgcccccttggggaccctgagagcctcctcgggcgcacccgggcgctggaagctgcacctgacggagcgtgccgacttccagtacagccagcgcgagctggacaccatcgaggtcttccccaccaagagcgcccgcggcaaccgcgtctcctgcatgtatgttcgctgcgtgcctggtgccaggtacacggtcctcttctcgcacggcaatgccgtggacctgggccagatgagcagcttctacattggcctgggctcccgcctccactgcaacatcttctcctacgactactccggctacggtgccagctcgggcaggccttccgagaggaacctctatgccgacatcgacgccgcctggcaggccctgcgcaccaggtacggcatcagcccggacagcatcatcctgtacgggcagagcatcggcacggtgcccaccgtggacctggcctcgcgctacgagtgtgccgcggtggtgctgcactcgccgctcacctcgggcatgcgcgtcgccttccccgacaccaagaagacctactgcttcgacgccttccctaacatcgagaaggtgtccaagatcacgtctcccgtgctcatcatccacggcacggaggacgaggtgatcgacttctcgcacgggctggcgctctacgagcgctgccccaaggcggtggagccgctgtgggtggagggcgccgggcacaacgacatcgagctctacagccagtacctggagcgcctgcgtcgcttcatctcccaggagctgcccagccagcgcgcctagcggcggccccaaccggccggacctcagcaataaggcggcccccggacctcaccccgcgccggcccccacccaggggctgcatgtggaccccccgggcggcccaggggaccccgccccgacccaggggctgtggacgatgtacaggcaacagagctacgcactcctttccttttggaagcaagaagaaaatacgtgaaaacggaaattaaagatttaaaattttaaaaaaaaaaaaaaaa

SEQ ID NO: 1851 - DNA, 457 bp, HOMO SAPIENS
gcaaattaccacagttcatctaacatgaaatagataacctgaatggtccaataactagtaaagatattgaattaatagtttaaaaaccttctgaaaggtaaatctctaccctaaatgatttcactggtgaattctatcaacacatttaatgaagaaaaaactccagttctaaacaactttcagaaaagaagagggaacacttcctcactcattatatgaggtaagcattgccctaataccaaaaccaatgttaacacaaaatatgaaacctacagaccaataaccctcatgaacataaatgtaaaaatcctcaagaaaacattagcaaatttaaaccagcaggatataaaaggaataataatacaccataacaaaaaaagaaactatccttggaatgcaaggctggttcaatatttgaaaatcaatcagtgtaatctaccatattaacagtctgaag

SEQ ID NO: 1852 - DNA, 438 bp, HOMO SAPIENS
  misc_feature (79)..(79): n is a, c, g, or t
  misc_feature (140)..(140): n is a, c, g, or t
  misc_feature (156)..(156): n is a, c, g, or t
gtgttctgtcaatttctgcagtaggtgcttgaccacatggttgtgagcagttacaaagggaagggtaatgaccattggnaccatggatcacacagcacaagtcatacatggtcacctttagggaatgccagaagtccacngtctatcgtgatgttngcaagagatttgatgaactgtatcataatgtctttcatagatagtaagacagggaagtgtttactgaaattgactatccaaaaaatgttgactaactggttttatttgactttgggggtaaattattcctagcaatctctgaattttgggttccaaagagccctggagacgagtggcagttgtgtgctcagtattataggttatttaaagtaaccgaaccaaaacttgcatatgcacagcacataacagtggttggcacgtagtgggttgtgtgtgcgtctg

SEQ ID NO: 1853 - DNA, 1850 bp, HOMO SAPIENS
cgcgctcgcagctcgcaggcgccgcgtagccgtcgccaccgccgccagcccgtgcgccctcggcgcgtacccgccgcgctcccatccccgccgccggccaggggcgcgctcggccgccccggacagtgtcccgctgcggctccgcggcgatggccaccaagatcgacaaagaggcttgccgggcggcgtacaacctggtgcgcgacgacggctcggccgtcatctgggtgacttttaaatatgacggctccaccatcgtccccggcgagcagggagcggagtaccagcacttcatccagcagtgcacagatgacgtccggttgtttgccttcgtgcgcttcaccaccggggatgccatgagcaagaggtccaagtttgccctcatcacgtggatcggtgagaacgtcagcgggctgcagcgcgccaaaaccgggacggacaagaccctggtgaaggaggtcgtacagaatttcgctaaggagtttgtgatcagtgatcggaaggagctggaggaagatttcatcaagagcgagctgaagaaggcggggggagccaattacgacgcccagacggagtaaccccagcccccgccacaccaccccttgccaaagtcatctgcctgctccccgggggagaggaccgccggcctcagctactagcccaccagcccaccagggagaaaagaagccatgagaggcagcgcccgccaccctgtgtccacagcccccaccttcccgcttcccttagaaccctgccgtgtcctatctcatgacgctcatggaacctctttctttgatcttctttttcttttctccccctcttttttgttctaaagaaaagtcattttgatgcaaggtcctgcctgccatcagatccgaggtgcctcctgcagtgaccccttttcctggcatttctcttccacgcgacgaggtctgcctagtgagatctgcatgacctcacgttgctttccagagcccgggcctattttgccatctcagttttcctggaccctgcttcctgtgtaccactgaggggcagctgggccaggagctgtgcccggtgcctgcagccttcataagcacacacgtccattccctactaaggcccagacctcctggtatctgccccgggctccctcatcccacctccatccggagttgcctaagatgcatgtccagcataggcaggattgctcggtggtgagaaggttaggtccggctcagactgaataagaagagataaaatttgccttaaaacttacctggcagtggctttgctgcacggtctgaaaccacctgttcccaccctcttgaccgaaatttccttgtgacacagagaagggcaaaggtctgagcccagagttgacggagggagtatttcagggttcacttcaggggctcccaaagcgacaagatcgttagggagagaggcccagggtggggactgggaatttaaggagagctgggaacggatcccttaggttcaggaagcttctgtgtaagctgcgaggatggcttgggccgaagggttgctctgcccgccgcgctagctgtgagctgagcaaagccctgggctcacagcaccccaaaagcctgtggcttcagtcctgcgtctgcaccacacattcaaaaggatcgttttgttttgtttttaaagaaaggtgagattggcttggttcttcatgagcacatttgatatagctctttttctgtttttccttgctcatttcgttttggggaagaaatctgtactgtattgggattgtaaagaacatctctgcactcagacagtttacagaaataaatgttttttttgtttttcagaaaaaaaaaaaaaaaaaaaaaaaaaaa

SEQ ID NO: 1854 - DNA, 7689 bp, HOMO SAPIENS
tcccacagtgcctggcccagaagccttgctaaatatttgaacaggattgcccaatacttttctgctgtgagaatgtaagatggatccagaagagcaggagctcttaaatgattacagatacagaagctactcttcagtgattgaaaaggctttgagaaattttgagtcctcgagtgaatgggcggatctcatatcttcacttggcaaactcaacaaggctcttcagagtaacctgaggtactccttgttgccaagacggctcctcatcagcaaaagattagctcagtgtttgcaccctgccctgcccagtggtgtccacttaaaagctctggaaacctacgagattatctttaaaatcgtggggaccaaatggctggccaaggacttgtttctgtacagctgcgggttatttcctctcctggcacacgcggcggtgtcggtgaggccggtgctgctcaccctgtacgagaagtacttcctcccactgcagaagctgctcctgcccagtctgcaggccttcatcgtgggcctgctgcccggccttgaagagggctccgagatctccgacagaacggatgctctgctcctgagactgtcgctggtggttggcaaagaggtgttttacaccgccctctgggggagcgtcctggccagcccgtccatccgcctccctgcctcagtcttcgtggtgggccacatcaacagggatgcccccggccgggagcagaagtacatgctggggaccaatcaccaactcacggtgaagtctttgcgtgcctccctgttggactcaaatgttcttgtgcaaagaaataatctggaaatcgttctgtttttcttcccattttatacctgtctggattccaatgagagagccatccccctcctcagatctgacatcgtgcgcattctctcagccgccacccagaccctactgagaagggacatgtccctgaacagaagactgtatgcatggttactaggctcagacataaaaggaaataccgttgtgccagaatctgaaatctcaaattcttatgaagaccagtcgtcttatttttttgaaaaatactccaaggatcttttagttgagggtttggctgagatattgcatcagaagttcatagatgctgacgtggaggaacgccatcatgcatacctgaagccttttcgcgtcctcatcagtctgcttgacaagccagaaatagggcctcaagtggttgggaatttgtttctcgaagtcatcagggccttttattcttactgcagagatgcccttggctctgatcttaaacttagctacacccagagtggaaattcgctgataagtgcaatcaaggaaaacagaaatgcctctgagattgtcaaaacggtaaatttgctgataacttctctaagcacagactttctctgggattatatgacaaggtgttttgaggaatgctttagaccagtgaagcagcgttacagcgtgaggaacagcgtcagccctccccccacggtctcggagctctgcgccctcctggtcttcctgctggatgtcattcctttggaactttactctgaggtgcaaacccagtatctccctcaggtgctcggctgcctggtgcagcctcttgctgaggacatggaggccttaagtttacctgaactcacgcatgccttgaagacgtgtttcaaggtgctcagcaaagtccagatgcctccttcctacctcgacacggagtccaccagcggaacctcgagtccagtaaaaggtgaaaacggcaaaataattttggaaacaaaggcagtgattcccggtgacgaagatgcttcgtttccccctctgaagtctgaggacagtgggatcgggctcagtgcctcgtcaccggagctctctgagcacttgagggttcctcgagtttctctggaaagggacgacgtttggaagaagggcgggagcatgcagaggacgtttctttgcatccaagagctaatcgccaactttgccagcaagaacatttttggagtacagctgacagcgtcaggagaagaaagcaagtccgaggagcctgcagggaagagggacagggatgggacgcagagcctggcagccaatgattccagcaggaagaactcttgggagcccaagcccatcactgtgcctcagttcaagcagatgctgtcagacttgttcacagcacgagggtctccattcaagacaaaaagttcagagtcaccatcgtcttcgcccagcagccctgccaggaaaaacgggggagaatgggatgttgagaaggtggtcattgacctggggggttccagggaggaacgcagggaggcctttgccgccgcctgccacctgctgctggattgtgccactttccctgtctacctgtccgaggaagagaccgagcagctctgtgcaacgctcttccagctgccaggagccggtgattccagttttccatcttggctgaagtccctcatgactatttgctgctgtgtgactgactgctacctccagaacgtggccatttccactctgctggaagtgataaaccattcccagtccctggcgcttgtcattgaagacaagatgaaacgctataagagctctggacacaaccctttttttggcaagctgcagatggtgacggttcctcccattgctccagggatattgaaagtcattgcagagaaaacagatttctatcagagggtggctcgcgtgctttggaatcagctgaacaaagagacccgggagcatcacgtcacctgcgtagaattgttctaccggctgcactgcctggcccctacggccaacatctgcgaggacatcatctgccatgccctcctggaccctgacaagggaacaaggctggaagctctgtttagattttccgtgatctggcatctgacaagagagatccaaggcagtcgagtaacatctcacaatcgctcctttgataggtccttgtttgtcgtgctggacagcctggcctgcacggatggtgccatcggtgcggcagcccagggctggctggtgcgtgcgctctccctcggggacgtggctcgcatcctcgaacccgtgctcctgctgctgctgcagccaaaaacccagagaacctccatccactgcctcaagcaggagaactcggccgatgacttgcaccgttggtttaacaggaagaaaacctctttcagagaggcatgcgcagtgcccgagcctcaggagagcggctctgaagagcacctgcctctgagccagttcaccacagtggaccgtgaagccatttgggccgaagtggagaaggagcccgagaagtacccgctgcgaggcgagctgagcgaggaagagctgccctactacgtggagcttccagacaggacggcccacggcgccccggacagcagcgagcacaccgagtctgcagatacaagctcctgccacacggacagcgagaacacgtcctccttctcctccccttcccacgacctgcaggagctgagcaacgaagagaactgctgtgcacccatccccatggggggcagggcgtaccccaagcgctcggccctgctggcggccttccagtcagaaagcttcaaggctggggccaagttaagcctggtgcgggtggactcggacaagacgcaggcttctgagtcgttctccagcgacgaggaggcggacttggagctccaggccctcaccacatccaggctgctaaagcagcagcgggaaaggcaggaggccgtcgaggccttgttcaagcacatcctgctctacctgcagccctacgactctcggcgggtcctctatgccttctcggtgctggaggctgtgctcaaaaccaaccctaaggaattcatcgaggctgtgtccaggactagcatggataccagctccaccgcgcacctcaacctcatctccaacctcctcgctcgccaccaggaggccctcattggccagagtttctacggaaagctccagacccaggtccccaacgtgtgcccccactctctgctcctggagctgctcacctacctctgcctgagcttcctgcgctcctactacccttgctatttgaaggtctcgcaccgagacattctcggcaaccgggacgtgcaggtcaaaagtgtcgaggttttgatcaggataatgatgcagctggtctcagtggccaagtcttcggaagggaagaacgtggagttcatccacagcttgctgcagaggtgcaaagttcaggagtttgtcctgctctccctgtcggcgtccatgtacacgagccagaagcgctacgggctggccaccgcccaccacggcagggccctgccagaggacagcctctttgaggagagtctcattaacttgggtcaggaccagatctggagtgagcacccgctgcagattgagctgctgaagctgctgcaggtgctgattgtcttggaacaccacctgggtcgggcccatgaggaggcggaaaaccagcccgacctgtcccgggagtggcagagagccctgaacttccagcaggccatcagcgccctgcagtacgtgcagccccaccccctcacctcccagggtcttctggtctctgcggtggtgaggggtctgcagcccgcctacggttacggcatgcatccggcctgggtgagcttggtcacgcattccttgccctacttcggaaagtccctgggctggacggtgacaccctttgttgtccagatttgcaaaaacttggatgacttggtcaagcagtatgaaagcgaatctgtgaagctctctgtcagcacaacctccaagagggaaaacatttctccagattatccactcacccttctagaaggtctaacgaccattagtcatttttgtcttttggaacaagccaaccaaaacaaaaagaccatggctgcaggtgatcctgccaacttgaggaatgccagaaatgccattttggaagagctgcctcgaactgttaacaccatggcccttctctggaatgttctcagaaaggaggagactcaaaagagacctgtcgatctcctaggggccacgaagggatcctcttccgtttactttaaaaccaccaaaaccataagacaaaaaattttagacttcttaaaccccttgacggcccatcttggggttcagttgacagcggctgttgcggcagtgtggagcagaaagaaagcccagcgtcacagtaagatgaagattatcccaacggcaagtgcatcccagctaacccttgtcgacttggtgtgtgcactcagcaccctgcagactgacacgctgctgcacctggtgaaggaggtggtgaagaggccaccccaagtcaaagggggtgatgagaaatcgcccctagtggacattcctgtgttgcagttttgctatgcttttctccaaaggctcccagtaccagccttgcaagagaacttttcttcactgttgggagtattgaaagagtctgtacagttgaatctagccccacctgggtattttctgcttctcagcatgctgaatgactttgtaacaagaactcccaacctggaaaacaagaaggaccaaaaagacctgcaggaaatcactcagaaaatcctagaagctgtggggaacattgccggctcttccttggagcaaaccagctggctaagcagaaacctggaagtgaaggcccaacctcaggcctctctagaagaatctgatgctgaggaggacctgtatgatgctgctgcagcttcagcaatggtgtcttcatccgccccgtcggtgtacagcgtgcaagccctctctctcctggcagaggtactggcttccctcctggacatggtttatcgaagtgatgagaaggagaaagctgtgccgttaatctcccgtctgctttactatgtttttccatacttacgcaaccacagtgcctacaatgctcccagcttccgggctggcgctcagctgctgagctccctgagtggctatgcctacacaaagcgagcctggaggaaggaggtcctggagctgtttctcgaccccgctttctttcagatggatacttcctgtgttcattggaagtccattattgaccatcttttgactcatgagaaaacaatgtttaaggatttaatgaacatgcagagcagttctttgaaactattctcaagttttgaacagaaagccatgctgttaaagcgccaggcttttgctgtcttcagtggagaacttgatcaataccacctttaccttccactgatacaagaacgcctgacagacaatctcagagttggacagacatccatagttgctgctcagatgtttctttttttcagagttttgctgctaagaatatctcctcaacatttgacttcattgtggccaataatggtctctgaattgattcagacattcacacagcttgaagaagatctaaaagatgaagatgagtcattgagaagcaccaacaaagtaaacagaacgaaagtttcagtcccggatgcaaatggaccctcagtgggggagataccccagagtgaactcatcttgtatttatcagcttgcaaattcttggacacagcgctttcttttccacctgacaagatgccattatttcaaatttataggtgggcatttattccagaagtggacacagagggccctgccttcctgtcggatgtagaggagaatcaccaagaatgcaaaccccacactgtcaggattctagaacttctaaaattaaagtttggggaaatcagtagctctgatgagatcaccatgaagagtgaattcccgcttctgcgccaacattctgtttccagcatcaggcagttgatgccattcttcatgactctaaatggtgcatttaagacccagagacagctgcctgctgatagcccaggaactccattcttggactttcctgtcacagatagcccaaggatcttaaaacaactggaagaatgcatcgaatatgattttctggaacatccagaatgttaaccatgtgagagagaatatgtttaatccatgtattggtactttactgaaaaccaggttatattctaaagaagaaagaaggcaggatagtgcttttgaacaagcctatttccattttgaaagtagatttcaggctaggtgcggtggctcacacctgtaatctcagcactttgggaggccaaggcaggcagatcacttgaggtcaggagttcgagaccagcctgaccaacatggtgagaccctgtctctactaaaaatacaaaaattagctgggtgtggtggcggcgcctgtaatcccagctacttgggaggctaaggcatgagaattgcttgaacccaggaggtggaggctgcagtgagccgagatcacgacactgcactccagctgtgtgacagaatgagaccatctccaaaaaaaaaaaaaagtagatttcagataatttactgttcagcaacaggacacacctccctaaatgccttgtaatatatttgaatctgattctgcatttcttcctcaatttatgtaatgaaaataaaattaatatatcatctaacagtagcacaaaatttgtaatatgaagtaaagtatgaagataatgaagaagttgttttctttgttgaagcagttatatgggtctttctcagtatatttctcttttctctaaaagtttaaacttattaaaagaatgttatttttaacctttcaaaaaaaaaaa

SEQ ID NO: 1855 - DNA, 3830 bp, HOMO SAPIENS
ctctgcgcctgcgccccggcacgaggtggggcggcgggcgtcagtacagtagagtgtgcgccggggtggggggcaacggtcagccgtcaccctgagacgggcggcggcgggatggcaacagcctccggggcctcggacttgtctggctccggagcgcccccgcccggtgtgggagctcaggcggcggcggccgctgaggaggaggagcgagaggtggtgcgggtccgagtcaagaaatgtgagagcttcttgccgccagagttccgctcttttgctgtagatccccagatcacctcgctcgacgtgttgcagcacatcctcatccgagcctttgatttgagtgggaagaagaactttggcatcagctacctgggccgggaccggctaggacaggaagtttacctctcacttctatctgactgggacctcagcacagcctttgccactgcctccaaaccttacctgcaattgcgtgtagatattcggccctcggaggacagcccattgctagaagactgggacataatcagccccaaagatgtcattggctccgacgtgttgctggctgagaaacggtcatcactgacgactgccgccctgccctttacacagtccatcctcactcaggtgggccgtaccttgtctaaggtccaacaagtgctgagctggtcgtatggggaagatgtcaagcccttcaagccacccctgagcgatgctgagtttcacacgtacctgaaccacgagggccagctctcccgacccgaggagttgcgcctgcggatctatcatggcggtgtggagccctcgctgcgaaaggtggtgtggcggtacctgctgaacgtgtatccagatggactgacaggccgagagcggatggactacatgaaacgcaagagccgcgagtatgagcagctcaagagcgagtgggcccagcgagcgaaccctgaggacctggaattcatccgcagcacggtcctcaaggatgtactgcgcactgaccgggcccacccctactatgcggggcctgaggatggcccacatctacgggcgctgcacgacctgctcaccacctatgccgttacccacccacaggtgtcctactgccagggcatgagtgaccttgcctcacccatcctcgctgtcatggaccatgagggccatgcctttgtttgcttttgtggcatcatgaaacgcctggccgccaacttccaccctgacggccgcgccatggccaccaagtttgcacacttgaagctgttgctgcgacacgctgaccctgacttttatcaatacctgcaagaggcaggcgctgatgacctcttcttctgttaccgctggctgctgctggaactcaagcgtgagttcgccttcgacgatgccctccgcatgcttgaggtcacttggagttcgctgccccctgatcctcctgaacatgaggtagagctggttggaccccccagccaagtggcagacgctggttttggtggccacagggggtggcccgtgcgacagaggcacatgctgaggcctgctggtggaggaggtagtacctttgaagatgctgttgaccacctggccacagccagtcaggggcctggtggtggggggcgtctcctgagacaggccagcttggatggcctccagcaactcagggataacatgggctccaggagggaccctctggtccagctgccccacccagctgcccttatcagctccaagtccctctctgagcctttattgaactccccagacccactgctctcctccttttcccaccctgattccccatcttcctcatctccaccatccacccaggaggcctctcccactggtgatatggctgtaggatcccccttgatgcaagaggtaggctccccgaaagaccctggaaagtccctgccacctgtaccaccaatgggcctgcccccaccccaggagtttggccgggggaacccattcatgctgttcctctgcctggccatcctgctggagcaccgcgaccacatcatgcgcaatgggctggattataatgagctggccatgcactttgaccgccttgtgcgaaaacaccacctggggcgcgtcctgcgccgggctagggctctctttgctgattacctgcagtcagaggtgtgggactcagaggagggggctgaggccacagccgcatcttgatcaggctttctcaagccctccatcggccccaccagatctccattctttgccatgagggccaacacatgagaccccacctccctccctgcctgccagccctagacttgttggagcatagagcccttcctccccaggcctaagtatgtggagctctgctttggcactgccccgcagaggccacgcctatttattctgtttctgttgttttgtttttaacaactatactttgcacacatgaaggtcactgtggtttgtgtgtttctctgcctcctccctgggttttgctgtagatggagtcctcaggggccctttacctgatggaggggaaatacttcacttggtggagagaggctccagcttcccccttgtgatggggagagtggatgctgacaatcagttcccaaaggtgagcccaggtggagcactgcttgaggaaggcctgagtctgtttttttggtacatccatcggcctgtaagggtctgtattatggctgtgaatatatgttttcaggacagccccctggatgagagataagagagttcctggctcaaaaaaggacaagattctttactgagattgggaagtatgggctacttagaaacgttggagcagccacccctggcattccacatgtcaccatttctaggatcttggcctctctgtgaggtttatgcaccaatgctggcagccctgggcaggggcctcggcctcctttttgttttccacttcagacaggtaccgtgcagatgttaacaaggtttgagcgaggtgcatctcacacaagtgtgaaagcccaatcatcacattgttgaattacaaaaggatctagggctcctattcttgtcacttgctttggagccagtttgaaagactggcctagcccatgcctagcggccctaaactgggattccagctcacagcacctgtcttaaccatttcagcagtagaaaccacttatttaccttctccatctcactaatatggacaaacaacaagcactgataaaacgcaggccctaatagaattcacttcgttatttggaggataatgatcaaaaaaaggtcctttttcccactgacatgctcagagggtgggattctctcacaggccaggtgctgtcatccacaaaggatgggtgaaataactggggtcctcaggtcacggtctagccacaccagcttctcccaagtactaaccaggcttgaccctgcttagcttcagaggtcagacaagatctggcatgttcaggatggtatggctgtagaccaggctgggttctggccagagctgttgcactaggcaatgctgccagagatgaggaggcatcagggcagtcatcccttctgctgtttgccccaagaatgccatacaaacctggggatgacccttaaaagtctcccgtcacccccagtattggggggaagctgactattcctcagatgatagcccagtcacttgaagaacaggacaagactattctgtgtctagggggctcaagcactgtgtgtgggtctaacgaatgcattttgtggaaatgggctcagactccccaaagggccatccaacctatgggagtgtctggccttctgaggtcctgaaatgtctcttttgtcagtaaacagctaataccctcaaaaaaaaaaaaaaaaaa

SEQ ID NO: 1856 - DNA, 2996 bp, HOMO SAPIENS; identical to SEQ ID NO: 611

SEQ ID NO: 1857 - DNA, 1369 bp, HOMO SAPIENS
gcgttggtctctgctgcttctggttctcagttctcaaacatcttaactgaaccatcagggccttagggaagcctgttcagcattcttcatctccaaatgtagtacatccatccgataagcctttccttaagagtgatctacgacactccccaaataagcctacacttgcctatccagaaagcaacagcagagctatattttgtgctcttaagaatcttaaaggtaagatttgatgcttggaacttgaaatgattctggcagaagaaagtgtgaaaaccttgtctagagaaacaattgaatccaagaaggtactggatggagagatatgggaaagggagaattcaaagaatgaagaatcaaagcacaatcaagaactgatatctcagttgatagctgcagaaaataaatgtaatcttttaggaaaacaattggaatacatgtgaaatatgataaagcatgcagaaagggagaggacatctgtcttagagaaacaggtttccctagaaagagaatggcgatacaatcaaagacatgtttggagccaacttgaaaaattggatctttatgaatgggagtataactttccacagtgcaggcccttgcagaaagaaaaatgtaagagttggtagcaaaactctgaagaagaacaggaaaggaaacatgtacaaactaaggcagctaagttacagactggtctagaaacaaatagacttattattgaagataaggcaagtccgcattttcccagtgcaagaagaattttaaaaaaagtcaaaaccacaagaaaaactaagttctaggaactattttggtgcacgagtacattatagattatgcttgggtgatgtgccatttgtagctgggaagtccacaagtcttagccatgctgtggcagccaatgttcagcttgtcttgcattgcatctaatgaagcaacacagtaaagctttgtgcagtgatcagtcattagtgttcctttggcaaagcaagtatcttcaagatgtgttgaaagtaagaagttgtcattaatacctccctcctctgacagcattaatgaggaattgtcagaagtcttacagactttacaggatgaatggacataggacctttaatcaccagcagcatgcaaaacttacccaggagttggcaactgttgaactgaaagacaacttagtgtgagaatcggaggcattagtgggaaggatggaggcaaaagccaaccaaataactaaagtttgaaaataccaagcccagctggagaaacagaaggtagagaagcagaagaaggaattaaaagctaccaaaaagactctggatgaagaaggaaagagcaacagccattcttctggaccacaaataagaaggcgtac

SEQ ID NO: 1858 - DNA, 8114 bp, HOMO SAPIENS
gggagggacgaaccgcgcgaccgagccctacaaaacccgccccggccgagtggcgaggcgagctttccagccgggctcccagagccgcgctgcgcaggagacgcggtggcctgagagcctgagggtccccggactcgcccaggctctgagcgcgcgcccaccatgagcgcccggaccgcccccaggccgcaggtgctcctgctgccgctcctgctggtgctcctggcggcggcgcccgcagccagcaagggttgtgtctgtaaagacaaaggccagtgcttctgtgacggggccaaaggggagaagggggagaagggctttcctggaccccccggttctcctggccagaaaggattcacaggtcctgaaggcttgcctggaccgcagggacccaagggctttccaggacttccaggactcacgggttccaaaggtgtaaggggaataagtggattgccaggattttctggttctcctggacttccaggcaccccaggcaataccgggccttacggacttgtcggtgtaccaggatgcagtggttctaagggtgagcaggggtttccaggactcccagggacactgggctacccagggatcccgggtgctgctggtttgaaaggacaaaagggtgctcctgctaaagaagaagatatagaacttgatgcaaaaggcgaccccgggttgccaggggctccaggaccccagggtttgccaggccctccaggttttcctgggcctgttggcccacctggtcctccgggattctttggctttccaggagccatgggacctagaggacctaagggtcacatgggtgaaagagtgataggacataaaggagagcggggtgtgaaagggttaacaggacccccgggaccaccaggaacagttattgtgaccctaactggcccagataacagaacggacctcaagggggaaaagggagacaagggagcaatgggcgagcctggacctcctggaccctcaggactgcctggagaatcatatggatctgaaaagggtgctcctggagaccctggcctgcagggaaaacccggaaaagatggtgttcctggcttccctggaagtgagggagtcaagggcaacaggggtttccctgggttaatgggtgaagatggcattaagggacagaaaggggacattggccctccaggatttcgtggtccaacagaatattatgacacataccaggaaaagggagatgaaggcactccaggcccaccagggcccagaggagctcgtggcccacaaggtcccagtggtccccccggagttcctggaagtcctggatcatcaaggcctggcctcagaggagcccctggatggccaggcctgaaaggaagtaaaggggaacgaggccgcccaggaaaggatgccatggggactcctgggtccccaggttgtgctggttcaccaggtcttccaggatcaccgggacctccaggaccgccaggtgacatcgtttttcgcaagggtccacctggagatcacggactgccaggctatctagggtctccaggaatcccaggagttgatgggcccaaaggagaaccaggcctcctgtgtacacagtgcccttatatcccagggcctcccggtctcccaggattgccagggttacatggtgtaaaaggaatcccaggaagacaaggcgcagctggcttgaaaggaagcccagggtccccaggaaatacaggtcttccaggatttccaggtttcccaggtgcccagggtgacccaggacttaaaggagaaaaaggtgaaacacttcagcctgaggggcaagtgggtgtcccaggtgacccggggctcagaggccaacctgggagaaagggcttggatggaattcctggaactccgggagtgaaaggattaccaggacctaaaggcgaactggctctgagtggtgagaaaggggaccaaggtcctccaggggatcctggctcccctgggtccccaggacctgcaggaccagctggaccacctggctacggaccccaaggagaacctggtctccagggcacgcaaggagttcctggagcccccggaccacccggagaagccggccctaggggagagctcagtgtttcaacaccagttccaggcccaccaggacctccagggccccctggccatcctggcccccaaggtccacctggtatccctggatccctggggaaatgtggagatcctggtcttccagggcctgatggtgaaccaggaattccaggaattggatttcctgggcctcctggacctaagggagaccaaggttttccaggtacaaaaggatcactgggttgtcctggaaaaatgggagagcctgggttacctggaaagccaggcctcccaggagccaagggagaaccagcagtagccatgcctggaggaccaggaacaccaggttttccaggagaaagaggcaattctggggaacatggagaaattggactccctggacttccaggtctccctggaactccaggaaatgaagggcttgatggaccacgaggagatccagggcagcctggaccacctggagaacaaggacccccaggaaggtgcatagagggtcccaggggagcccaaggacttccaggcttaaatggattgaaagggcaacaaggcagaagaggtaaaacggggccaaagggagacccaggaattccaggcttggatagatcaggatttcctggagaaactggatcaccaggaattccaggtcatcaaggtgaaatgggaccactgggtcaaagaggatatccaggaaatccgggaattttagggccaccaggtgaagatggagtgattgggatgatgggctttcctggagccattggccctccagggccccctgggaacccaggcacaccagggcagagggggagccctggaattccaggagtaaagggccagagaggaaccccaggagccaagggggaacaaggagataaaggaaatcccgggccttcagagatatcccacgtaataggggacaaaggagaaccaggtctcaaaggattcgcaggaaatccaggtgagaaaggaaacagaggcgttccagggatgccaggtttaaagggcctcaaaggactacccggaccagcaggaccaccaggccccagaggagatttgggcagcactgggaatcctggagaaccaggactgcgtggtataccaggaagcatggggaacatgggcatgccaggttctaaaggaaaaaggggaactttgggattcccaggtcgagcaggaagaccaggcctcccaggtattcatggtctccagggagataagggagagccaggttattcagaaggtacaaggccaggaccaccgggaccaacgggggatccaggactgccgggtgatatgggaaagaaaggagaaatggggcaacctggcccacctggacatttggggcctgctggacctgagggagcccctggaagtcctggaagtcctggcctcccaggaaagccaggtcctcatggtgatttgggttttaaaggaatcaaaggcctcctgggccctccaggaatcagaggccctccaggtcttccaggatttccaggatctcctggaccaatgggtataagaggtgaccaaggacgtgatggaattcctggtccagccggagaaaagggagaaacgggtttattgagggcccctccaggcccaagagggaaccctggtgctcaaggagccaaaggagacaggggagccccaggttttcctggcctcccgggcagaaaaggggccatgggagatgctggacctcgaggacccacaggcatagaaggattcccagggccaccaggtctgcccggtgcaattatccctggccagacaggaaatcgtggtccaccaggctcaagaggaagcccaggtgcgcctggtccccctggacctccagggagtcatgtaataggcataaaaggagacaaagggtctatgggccaccctggcccaaaaggtccacctggaactgcaggagacatgggaccaccaggtcgtctgggagcaccaggtactccaggtcttccaggacccagaggtgatcctggattccaggggtttccaggcgtgaaaggagaaaagggtaatcctggatttctaggatccattggacctccaggaccaattgggccaaaaggaccacctggtgtacgtggagaccctggcacacttaagattatctcccttccaggaagcccagggccacctggcacacctggagaaccagggatgcagggagaacctgggccaccagggccacctggaaacctaggaccctgtgggccaagaggtaagccaggcaaggatggaaaaccaggaactcctggaccagctggagaaaaaggcaacaaaggttctaaaggagagccaggaccagctggatcagatggattgccaggtttgaaaggaaaacgtggagacagtggatcacctgcaacctggacaacgagaggctttgtcttcacccgacacagtcaaaccacagcaattccttcatgtccagaggggacagtgccactctacagtgggttttcttttctttttgtacaaggaaatcaacgagcccacggacaagaccttggaactcttggcagctgcctgcagcgatttaccacaatgccattcttattctgcaatgtcaatgatgtatgtaattttgcatctcgaaatgattattcatactggctgtcaacaccagctctgatgccaatgaacatggctcccattactggcagagcccttgagccttatataagcagatgcactgtttgtgaaggtcctgcgatcgccatagccgttcacagccaaaccactgacattcctccatgtcctcacggctggatttctctctggaaaggattttcattcatcatgttcacaagtgcaggttctgagggcaccgggcaagcactggcctcccctggctcctgcctggaagaattccgagccagcccatttctagaatgtcatggaagaggaacgtgcaactactattcaaattcctacagtttctggctggcttcattaaacccagaaagaatgttcagaaagcctattccatcaactgtgaaagctggggaattagaaaaaataataagtcgctgtcaggtgtgcatgaagaaaagacactgaagctaaaaaagacagcagaactgctatttttcatcctaaagaacaaagtaatgacagaacatgctgttatttaggtatttttctttaaccaaacaatattgctccatgatgacttagtacaaagtttcaatttgtttccccacaaaacaaagcaattctttcaagtcagttctgtgatctgggtctctaatctgtgctgtttcaaagttctctgtggcaaagcagcaactattcacaaaatatcaccaaaaacctattccacttacatccaaggcactgtcactacggtgattgtatgaagtttgaatgctgcaagttatgaaatatttggcccgctggattcccacatttgtcttctttctgtctttaagactcagggaggctaaatcagtgtttgattgccccgccaacccttcctgaaacttcagaccctgggtaggggaagagaagggggcatgtggtatcctggagcattgtgtatagaactggattttcagacctgctgaggaccgtaaggcctgatggaacacagaactgaactgaggttcatggattttccaggactgtttcaaacatgcccattactaacggcaaaagggggattccctgatggaaccataatacccttggaaatactgtatggttttgttttgttttgttggtttttaaagatttttgtttgtttattgaattcatttcactgtagctctaaaatctgcttgtattccaagcatataaaattttcccccttagtgaattagttttaaaatgatattgttatatacatactatgaaatatgtataactttaacttctgttttaccagcatacccacacaaataacaagaatactacttatgaaatgtgcactttatcctcattccataaatgtcggtgcataccttatgtaagggagcagttcaataatccatgaaagaacttaaggcatttgttggtttatcagactcggaatctattttctcattgctctgaatatgtcatcactctaggttttacagatttattcctttgttacttctctaattcttcctttgtaaaaaaaaaaaaaagcaacactttttatgttatatgttgttcttacaaaccatactgaaagagtccattgtttaaaaatcttaatgtatcaaactgtataacttggccgctgtatgtcttaaaacctgcttttcaatgtgttgatacattcccaaggttacttaattcaacttaactatcatcttattcagcaccaagcatgtcccaggcactgtactaacctacagagatgctaagagaaaaaaaagacttgtttctgatctaatatcccagaaaaagtaactcattgctctgttaataatctcacatatacaagtagcttccctcccctctagttttttcttccttttcactgctgttatatttcatcatgataattcagcaggcccaagtaaaggttaaaaataaggtctatgcctagggaaactcagggcttctagtttctcttagaaaagctaagagaagataaggtctgaataatagcagaaaaaccaacatctacaaaacattaaactagtgttatacttgatgataacactatttgatgagtcttagagtccagacacaaagagacaaagctttgaagatgctttttgatctacctaggtggagttggtggtgctgatatttaaattcaggctactgcttcaatctcaattgctttgtaagtgaaaaacatgacccagaggacagcacagactatggccatggctcacatggtttacatccttcactgctcacgtgtttgctgtcaagccatttttacatctaaactaagatgtgcagcatttcacttatttagattcacttaacaaacaaatttttctgctttaaaaatgtcttattgtcccaagtgtactatagcggcatatagagctagctaatctctacaaaccctctgtaggccagtagttctcaaagtgtggtctctggaagagcagtatcagcatcatctgggaacttgtcacagatgcagattctagggaccactccagacctacacaatcagaaactcttgggggagggcccgaaatatctatgttttaccaagcccaccacatgattctgatgtactctaaatactgagaaaacctgttctagacaaatacccaagcaacaactccgcaggcagttaccaagtacggctggctacaactgctccatccgtgcctctttttaaagttcaaactcacaggtgactctaaggttatctacttttactcataagtaaaagccctagactggtgctaatgtcaaaccactggcctccactcaggcctccatcttctcatgccctcttaccagtatttaacttctgaggaagacaagtgatgctaaaacctgaaattccaatgaagccatatgaacagctgttcagttgcacttctaagactttacttagcagtaaattatagctcatgtgcattattttccagataacttagcttatgagtagcttatacaattatgaagatttaatattacagataaaatgtaaactgtttctttaaaattggggcttcaactttggaatttcacagcgtgctaaaataacagatttctcagaagtctttcagcaagataaacattattaagtaacttatttatgaaagtattaaaatgcttacatttgaacttgatggctaacttacaaagattctctatgtatcaaatgtaacttactgcgactaaacttaatttaatatttactctataaccaaatgaaatatatttaaaatatattgaatattttatattgttatatcctgacaagattataatattttaatgtactaatatttctgtaattatatctaaaatattattttattatattgcctaagaataaacatttgttaaattggaaaaaaaaaaaaaaaaaa

SEQ ID NO: 1859 - DNA, 1667 bp, HOMO SAPIENS
gggcattgttcgtgccgcgcttctagcaacgccgggccggtaaccccctctccctccttgcgcgttccgggtctcgcaagcgcctccaaggtttgtcttgaagcatagctccagctggagggtaccttttaagctgttcaaggtcaagatgaatacaaactcaaaggaggttttatccctgggtgttcaagttcccgaggcatgggaagaacttctgacaatgaaagtggaagcaaaaagtcaccttcaatggcaggaatccagactgaaacgcagtaatccactggcaagggaaatcttccgaaggcactttcgacagctgtgctaccaagagacccctggaccaagggaggctcttactcgactccaggaactttgctaccagtggttgaggccacatgtgagcacaaaggagcagattttggatctgctggtgctggagcagtttctatccattctgcccaaggagctccagggctgggtgagggaacactgtccagagagtggagaagaggctgtgattttgctggaggatctggagagagagctcgatgaaccacaacatgagatggtggcccacagacacagacaagaagtcctctgtaaagagatggtgcctctagcagagcagacaccactgacccttcagtcccagcctaaggagccacagctcacatgtgactctgctcagaagtgccattctattggagagacagatgaagtaaccaagactgaggacagagagttggtgctaaggaaagactgtcctaagatagtggaaccacatgggaaaatgtttaatgagcagacctgggaggtatcacagcaggatccctcacatggagaagttggtgaacataaggataggatagagaggcagtggggaaacctcttaggagaggggcaacacaaatgtgatgaatgtgggaagagctttactcagagctcaggtctcattcgacatcaaagaattcatactggagaaagaccttatgaatgtaatgaatgtgggaaagccttcagtcgaagttctggtctttttaatcaccgaggaatccacaatatacagaaacggtaccactgcaaggagtgtgggaaggtcttcagtcagagtgcgggtcttatccagcatcagagaatccacaaaggagaaaagccgtatcagtgcagccagtgcagtaagagctacagtcggcgttcatttctcattgaacatcagagaagccacacaggggagcgacctcaccagtgcattgaatgtgggaaaagctttaatcgacactgcaacctcattcgccatcagaagatccacacagtggctgagctggtctagggcttggctatgagcaagttttccagatcaccacccaagttgtgtggggcaggttgagactagaaaatgcctctttcttcctttctccatgaaatgtgtttgaaacaaatcctgacttaaggcccagggacttccttaaaggaaagttgggtgtttgaagctactgttttctcttttgttcattttacctctttcttactcttactagctgtgtccctcttatttataatttatttatttttttgagatggctgctaaacccttctaataatataataaatggcactgccacagccaacatgcccaaaaaaaaaaaaaaaaaaaaaaaaaaaaa

SEQ ID NO: 1860 - DNA, 4278 bp, HOMO SAPIENS
ggctcgacccggaagccgccgtggccgccgcacaagctgcgctcgtctctcggctggggagctccgtgtcgcaccgggttcttgggctggccgtgtccttctccctcggtcgccactggcccatgagtccccatggcgacggcaggggccaggcccaggggcgggcagtccgagtggggctgcggcgctccgggggcatccgcggcggcgtggcggtgttcgccgccgtggccgcagtgttcaccttcaccctgcccccttcggtaccggggggagactccggggaactgatcacagccgcacatgagcttggagttgcccatcctcctggctatcctttgttcacgctggtggctaaactggcaattacactgtttccttttggttcaattgcctaccgcgtcaatcttctctgtggcttatttggagcagtagctgcatcattactttttttcaccgttttcaggctttctggctcatctgctggaggaatccttgctgcgggggtgttttcattttctcgtctaacatggcagtggtccattgcagcagaggtttttagcttaaacaatctctttgtggggctgcttatggctcttactgtacattttgaggaagcagcaactgctaaggagagatcaaaggtagctaaaattggtgctttctgctgtggccttagtttatgtaaccagcacacaataatactctatgttttgtgcataataccttggattctctttcaacttttaaaaaagaaggaactctccctgggctctttgttgaagttgagcctgtacttctctgctggtttgctgccctatgtccaccttcccatctcatcttaccttaatcacgcccggtggacctggggagaccagacaacactgcaaggatttttgacacattttctcagggaagaatatggaaccttcagcctggccaaatctgaaataggatccagtatgtctgaaatactgctttctcaagtaacaaatatgaggaccgaactctcattcaacatccaagcccttgcagtttgtgcaaatatatgtttagcaacaaaggacagacagaatccatcattagtatggctttttactggaatgttttgcatttattcattgttctttgcttggagagcaaatttagatatttcaaaaccacttttcatgggtgtggtggaacgattctggatgcagagcaatgcagtagtggccgtcctcgctggcattggtttggctgcagttgtgtctgagactaaccgagtgctgaatagcaatgggcttcagtgtctggaatggctttctgcaactctttttgtagtttaccaaatatattctaattacagtgtttgtgaccaaaggaccaactatgtgattgataagttcgcaaagaaccttctcacctctatgcctcatgatgcaattatcttactcagaggagatttgccaggaaattctctccgttacatgcattactgtgaggggttgaggcctgacatttcattagtggatcaggaaatgatgacttacgagtggtatttacccaagatggcaaagcacttgccaggtgtcaactttcctgggaaccggtggaatcctgtggaaggaatattacctagtggaatggtcacatttaatctttatcattttcttgaagtaaataaacaaaaagaaacatttgtttgcataggaattcatgaaggcgacccaacctggaaaaagaactattcactttggccatgggggtcttgtgacaaattagttcctttggagattgtattcaaccctgaggaatggattaaacttacaaaaagtatctataactggaccgaagaatatggaaggtttgatccatcttcttgggaatctgtggccaatgaagaaatgtggcaagcgaggatgaaaacaccgttcttcatctttaacctggcagaaactgctcacatgccttcaaaagtgaaagctcaactctacgctcaagcatatgacctttataaggagattgtctatttacaaaaggagcacccagtgaattggcacaagaactatgccatcgcctgtgagcggatgctgcgtcttcaggcaagagatgcagatcctgaagtgctgttatcggaaaccatcagacatttccgtctgtactctcagaaagcaccgaatgacccacagcaagctgatattttaggtgctctaaagcacctaagaaaagaactgcaaagtctgagaaataggaaaaatgtctgagacagcaaaatatgaaaaacctgctcatcgttcagcttccaaaattctgaagtctggaagtttttccttcaagaaaagaaactgcataaaaaatttaaaactaagtcatctcccagatataagtatcatggtccagcagtactgtttaatggggtattcagtgactaaggtctgctatttatgcaaaattctgtttatcccgtgttaccaaattaccatttcagtgagaagcttttgaaaagtcttctgacttccagtctttcaccagatgactgcactggattagattctagaagagaatgaaccattttcatataactaaatattggtcatgaactgtgtaagggccatgcttattgggatcagttttaaagttaaattcttttgatattaataccagaccaaagacattttctgtttcctggaaaaaaaaaatgaatcatgttaggctttaggtgagagtacattttttacaaagtagctatagttgttacatagtcttacacttcaagctaaacaccaaatgggtgatattttgaaaaaagtttgtgttttactgtcttagatcgttcttggaaatcactaaaaaaaaaaaaagttaatttgatgtttgcttatttcagttgcagaaactggcgagtaaaaaagattttgcatttacttaattaattttatatttatgttttatttctatttggactcagagatctagacccaataattagtaggctcctgctgccaaaatgcaaaggggaaaaaaaggcagggattgggggggatggggaagtggcccaataaattcatttctgttacaagcatcttttatacatattactaaagagaacatagtaagaaatgcaaataatagttctttattttattatgacagttaattaatagcaacctgttttaatgaataaagtcactcagagtccttcagcacttcctaagtagaggccagaatctgtagggcttcttttccccccaattgtatagctcctagactccaagcactatataggcccctgtatagaaatgctcactaatgaagagggagggctagaagcttgtctgcattcaaagatcactggtgagtcattcagcaagaaaaggccccttaccaggaatagtcacagttccgtggcattgtactagcaaaagggtctgatcaaaggtctcctgtggagcttgcatggttccctttcatactacgaccataattaaaaccactaattctcttttaaaatgctgcaggatgccatgtaggcatctgtctggagtgtcctttgtgatgtcataagctgttaaggaccagtgccgagggcttttgagtgaaatgccagtcatgaaggtgcttcaagacaagggtgcctctaaaagcttgacagggccttgactgcacaattcgagctgaatttgccccttgtcagctgccagtaaataaatctcaaagggggaaaagctgaagtttcattacctgatccatggggctttgttggttttggcatcacacaggggaagctcttgcccctccattctctggatttgaagatgtccattggagcctgcagtgcctggacagggttcagagcggaaccttttgaagagtgtcaatagttgtaacagttcagctgttaggaagacaaataaatggaggagctcattaatccgcttttggctctcagtgccttttgcccttttatcacagccttattaggctcctactcatcttgaaccagaaaaaaatgaattgaagttgttgagtactaattggcaaagacttttaatcatgggccaagaactttcactgacttgaaagtaacttctccacagggaaggaccaaaaacctggtttaccttaaaacaaaaacctgttggagttcagcgtggtgtaaaaatgtaaggaagcattgataaattgtctaagtttatccatttgaaagaaattgtgtaagattatgatattctcttttctttaaaaaaaaaagtacaataaaattcaaacattccttaggaaaaaaaaaaaaaaaaa

SEQ ID NO: 1861 - DNA, 5123 bp, HOMO SAPIENS; identical to SEQ ID NO: 760

SEQ ID NO: 1862 - DNA, 4339 bp, HOMO SAPIENS
ataaaatcctactcgaaacgttcagaccacaggtggacccaagaggggctgcctctgccctcctagacccccactggtcttgtcataccgctcacctagcttgatccgccccacagtctttggaatcggcgccatcgcatctacagtgacccggaaatgaaaggtagtctagtatttgataccagccaaagggcggggtgggacagagtgggcggccatgtttgttaggggcagaagcctcccattacggagcacgagagagtccatgaaggtccccgcgactcccggactggagaaaacggctcttgcgatggggcgaagtccgagctgcggcgggcgttggtccgtgcagggaagtgggaatcgttaggttcgttctggacccgccgccccatggcccaggcgtctcgctcaggtagcctgcctccactcgttatcgtgcccccgctgagggcgcaacccgggggcactggggaggagcagtgggagagaagtcgaacgggcggtcttcgctgggaggttcactgctggccgagcggaacttctggagggacgccgtggtggccgacgccggcggatgtgagcgaggactacgaggctgatgctgcggcctggaggcgggggcccgcaggtggcggcccgatccctcccgcgctgcagcgtctccgggcggtgttgctgcggctgcatcgcgagcgggagcagctcctccaggcccgagactgcgcctaccacctacagtcggctgtgcgactcatgaagaccctgagtcctggctcgccatccggcggccctagccccttgccccagtggtgccgcgacctgcagctgcacccttcccaaggggcggttctgcgaatcggccctggggagactctcgagccgctgctgctagcgcgccccatcggactagccgcccagtgcctggaggctgtcatcgagatgcagcttcgcgctctcggccgggagcccgccagcccgggcctgtcgtcccaactcgccgagctgctctttgcacttcccgcctaccacacactacagagaaaagccttgagccacgtcccaggggccgcacgtcctttccccacgtcccgtgtgctccgcctcttgacgggggagcggggttgccaggtggcaagtcggctggacgaggcgctccaaggatcggcgttgagggaccagctccgcaggcggtgccaagaggagggggatctgctaccagggctgctgggcctggtcgggggcgtggcgggttcagccagctgtggactagggctcggaggggctggggccttgtggagccaatactggaccctgctgtgggcagcctgtgctcagagtctggacctaaatctgggaccctggagggaccccagggcaacagcgcaacagctgagtcaggcactgggtcaggcatccctgcctcaggagtgtgagaaggagctggcatctttgtgtcacagactacttcatcagtcgcttatctggagctgggaccaaggtttctgccaggccttgggatcagctcttgggggtcagagcagccttcccacatcctctggcactgctgaacttttgcagcagctctttcctcctctcttggatgcccttcgagagcccaggttacgacggattttctgccagcctgcaggtctctgtacccttcagaccaccttgctctggttcctgggcagagctcagcagtacttggcagcatgggacccagcttccttcctgctcctgatccaaaaggacttacctcctctgttgcatgaggcagaagctttgtatagcctggcctcagaggaaagcttagctctggaagtggagcagcagctgggcctggagatccagaagctgactgcacagatccagctcctgcctgaagagtcactaagtgtcttttctcaagaatgtcataaacaagccatgcaaggtttcaagctctacatgccacggggtcggtactggcggcttcgtctctgtcctgaacctcccagtgctcctagtgagtatgctggtttagtggtccgcaccgtactggagcctgtgttgcaaggattgcaagggttgccacctcaagcccaggcccctgcccttggtcaggctctgacggccatcgtgggtgcctggcttgaccacattcttacccatgggattcggttcagcctgcagggagcgctgcagctcaaacaagactttggagtggtcagggagttgctggaagaggagcagtggagcctgtcccctgatctccgccagaccctgctcatgctcagcatcttccagcagctggatggggccctgctgtgtctgttgcagcagcccctgcccaagtctcaagtccacaggaggcccccctgttgctgtgcttgtcaggaggtccagaccacgaaattgcccagcagctgcctcaatagcctggagagcttggagcccccgctccagcctggaacatctccagcccagacaggtcagctgcaaagcacactaggaggaaggggacctagcccggagggctacctggtgggaaatcagcaggcctggcttgccctcaggcaacaccagcgaccccgttggcacctgccgtttttttcctgcctgggaaccagtcctgaatcctaaggagcctgggaccaggagccagaaagttaagagctccccatctctagctggaaaatccagacatttggaattgcatattaaggaagcccagaactggaagcttggaggaaagcatactggagaataagctacaaagagcctgggcttaagaatccaagattaggggctgggcgaggtggctcacgcctgtaatccagcactttgggagaccgaggcaggcggatcatgaggtcaggagatcaagaccatcctggctaacacggtgaaaccctgtttccactaaaaatacaaaaaattagccgggcgtggtggcgggtgcctgtagtcccagctactcgggaggctgaggcaggagaatggtgtgaacctgggaggcggagcttgcagtgagctgagatccagccacagcactccagcctgggtgacagagcaagactctgtctcaaaaaaaaaaaaaaaaaaaatccaagattaggcagggcatggtggctcacacctataatcccagcactttgggaggctgaggcaggcggatcacctgaggtcgggagttccagaccagcctgaccaacatggagaaaccccgtctctactaaaaatacaaaattagccaggtgtggtggcgcatgcctgtaatcccagctactcaggaggctgaggcaggagaatcgcttgaacctaggaggcgaaggttgcggagagccgagattgtgccattgcactccagcctgggcaacaagggcaaaacttcgtctcaaaaaaaaaaaaaaaaaaaaaaaaaatccaagatcactccagcacctggaatccagagtaaagagcaagaccatagcctggaacctgaaggtcagacccttgggaggttcaggcctagttctccatcactgaagatatctcagggataaagagttgagtgctcggccaggtgagggggctcacgcctgctcacgcctgtaatcccagcactttgggaggcctagaggggcggatcacgaggtccgatcaagaccatcctggctaacgcggtgaaaccccgcctctactaaaaatacaaaaaattagccgggcgtggtggcacgcgcctgtagtcccagctactcaggaggctgaggcatgagaatcgcttgaacccgggaggcagagattgcagtgagccgagatcgcgccactgcactcctgcctgggcaacaagagcaaaacttcgtctcaaaaaaagaaaactggctagaatgcacttcaacttaagtcctgggagctacgctaattcatggagaaccacagaggtttaataggcatttctatacctggatcagccccaaggacagtattaccctgtactgcccttcctattactattttcagtcatttactaatattgggctgtagtactttcacgtttaagctttggctattcagagctcactacgtttaatcttcagttacctgaatggtgtttaccttctggtgtggatcatcccggcttgtgttagtgctctctctttggaagaagccaggatttaagatcgagttagcctagatgtggcccagcagggtacagaaggggaaaggctgcagaaaacgggcgtattttcgtgcaaagaggtttttgcgccatttatttatggttttcaccgtcgtatgagaggactattcatgataggctgtatttgctgacagcctactttgggctcccccatgcgttgtgccgaaacca

SEQ ID NO: 1863 - DNA, 330 bp, HOMO SAPIENS
  misc_feature (54)..(56): n is a, c, g, or t
  misc_feature (69)..(69): n is a, c, g, or t
  misc_feature (89)..(89): n is a, c, g, or t
  misc_feature (101)..(101): n is a, c, g, or t
  misc_feature (105)..(105): n is a, c, g, or t
  misc_feature (124)..(124): n is a, c, g, or t
  misc_feature (130)..(130): n is a, c, g, or t
taatcttactaacctgtccctataaaagggaaatttgaacacagtgacacccannnggaagatgatgtnaagacagagagagaagacangccatcagcaanccanggagagaagtctggaatgnatcctnccctcacagccctcagaaggaaccaagccagccagcctctcaatctcacacttttagcctccagatctgtgagacaataagtttatgttgtttaagccctccagtctgtggtactttgtaatgtagccccagcaaactaaaacatgggttggctggtggcattagaacaagttgcccatgaaaaggttacaggcagccta

SEQ ID NO: 1864 - DNA, 3588 bp, HOMO SAPIENS; identical to SEQ ID NO: 1843

SEQ ID NO: 1865 - DNA, 4163 bp, HOMO SAPIENS
acacgctgcgcaggcgcaggagcggctccgggtagtccccacagctgcgccggtgactgaggggccgggcagtggagaagtggtggcggcgggcggcgggcggcaaaggagcagccatgagggccgggcccagtcaccgacctgtgagccactgccccatgttgtgttgatgccaatctgccatgctagcctgtctaccagggccaggtgacctgtcctttcagcttctttctcacacgcagatgaacactggacttcagaaatgggacactacacagaaaatgagaactgctcactatcctaccccagccgaattggatgcgtatgctaagaaggtcgcaaacaacccactgactataaaaatcttccccaacagtgtgaaggttccccagcggaaacacgttcgtcgtactgtgaacggcctcgacacatcagcccagcgctacagcccctacccgacacaggctgccaccaaggcaggcctgcttgccattgtcaaagtgccagccaaaagcatactcaaggactttgacggcacccgagcccggttgctccctgaggccatcatgaaccccccagtggcaccctatgctactgtggcacccagcactttagcccacccccaggcccaggctctggcccgccagcaggccctgcagcatgcacagaccctggcccatgcccctccccagacgctgcagcaccctcagggtatcccgccaccccaggcactgtcccaccctcagagcctccagcagcctcagggcctgggccaccctcagcccatggcccaaacccagggcttggtccaccctcaggccctggctcaccagggtctccagcacccccacaatcccttgctgcatggaggccggaagatgccagactcagatgcccccccgaatgtgaccgtgtctacctcaactatccccctttcaatggcggccactctgcagcacagccagcctccggacctgagtagcatcgtgcaccagatcaaccagttttgccagacgagggcaggcatcagcactacctcagtgtgtgagggccagatcgccaaccccagccccattagtcgcagtctgctcatcaatgcaagcacccgggtgtcgacccacagcgtccccacaccaatgccttcatgtgtggtcaatcccatggagcacacccacgcggccaccgccgcgttgcctgctgcaggtcctgtcaacctgcccacaggcatctctcgcgtccccactggctaccctagcgacctcaagccagtcacctggaaccagcaccagctggcccacctacagcagatgtgcagcgaggctagtgggacgccagcccctggcctgacaggcaagcatgcggcaggacgcgagttggcagggcctggctttgtgggcaaggcccctgcctacccgcaggaactctgcctggcgcagtccttccatctgaagccacccctggaaaagccgaccccatccccaccagtcaacggcatggcagccccattggcctaccccaatggtcactacttccaacccctgtggaacaacattctgcccactcccaatagcgacagctcggggtctcaggaccttgccatgccgttccacggtgggcagcccacaggtgcacccctcgactgtgcggcagctcccggggcccactaccgagcagggaccgggggcggtccagtggcaagccagaacagcttgatgcaaacagtggattacctaagtggggatttccaacaggcctgcttccgagaacagagcctggccatgctgagcaaggcccaccgagcccctggcaaccgagcccccgatcccacagagagtcgaagtcttcatattcagcacccagggtatagataggtagccctgctgccctccacgtgcaacacatcatacatcaccctcctaggtttagtcttttaagtaactggatagtttcaaagtttcactgctccagtgtgatcattcttagatgtctaagaaagggaatttggtgggatctaagtggggacagaaggggtcctctcgtcctcccctccagcaacttttggttttatgttagaacctaaccctaagcccaggcttttctctccactgactgcctgtcagctagtctctccaccttggccatttccagccagctcccacccatcttttcttgaatctcttcctgtttcccttaggacgactgaggtgtgggctgacggaatgccctagttgaggtagtataggtgctcaggcccctaatccagacctctacctgttgctaccccccttcccctccctccaggactaagaagcaagatttcccaggtgctctgaaagctaattacttactcatcgaaggatctcaaatcaaagctgacccagtcttcatatccttcaagttcctttccattcctcaaggctttgttttgtgtctatattgatcccacagccactgcacttgcccttgccacacttgatctcaagggcatcttggaagtatttgaccatttcttgagatatggggggaaaaagtctttgtattggcatcttggttccagactcccctttccaaacctagaaaaatacagtgacctttgagcatacccaagatccctttctcactgttgcctgtcccctaactcacctccccacagcccctatcctttccccctcaacaaaaacaaaatctaccttacttgaggaattaggtaggtaaggaatgatcacattggagtttgggattaaaaacaccaaaaaaaaaaaaatgcatttggttctctctacactggctaagaatattgctctacactgtaagttttaaacgttacgtttctgtatgaatgtagtgtgggtttgagtagcattgtgtgtgagtggccccacaggtacattcaccctctagtgcagcccctcagtttaatgaaggaaaaaaaaacaaacacaaagccttaagctctttgagtacttcctttaccaaatgagcatggttctaacacctggagctgggcctacattggaaacaagcccctcctgccctctgtccattcttagagcataccttcatccactccatgctcagcacgtctcatcccaagcgacaattagttggctagaaacacttttctgtaattttaaacttagactgttttgttacaaatttttgcaccattctgttaaagatgcagaattgggcttttttattttttacagatgaaataagcccttacctttcctcttgtctctggggaatgtcagctgatggttcttatttaaggttttgcattttgttcactatccactactgttcgttagccagaaattctctagtgatctgaagcaatgtgactgaagaccagttttaagttatgtgttggcaagttgccttatatttaaaaggaaaaagaaaaaaaaaaaagcctgattgtgttatgccaaatgatagcaacatgaagtcctaatttattgttcccaattgttttcctgccgtctgtgaacactggtacctccctgtcctgatcccccaggagcacctgtagcttctgactcaatgccttctccgaaggtgttggccgccatctcacccagggccctcttccagttcctgcttttctgagtcagatttaaagagcaccactgtcttccccctaccccttgcttgatctccaaagcagatattcttgctgtatttttttttcctccccaatacctctccctgaaaggtgagctgctattttaggaaactggaccagacaccaacttgggggctttaagtcaaacaacctcaaacccatctcttcctgtgtaggggtgcaagcctctgaagctctcactcccacccttagtctgcatggaaaatgtactgtgatccccctgcccccaactgccctcgcctttggtgtgagatgttccttctttcggagttcagcctgagtccctctcccctctgccagccaacccccagccagcaataagggtccaagccagggcctcctctccacactccctgtctccatcctacactaccctagggaatacctggattccccattctatccacatactgtagcattcattctccatctctctcacctcacctgtggtggtttatgggtgtgatggggtttttaagattattataaaccagtaaaaataagaaaacctcgc

SEQ ID NO: 1866 - DNA, 3417 bp, HOMO SAPIENS
cggaggcagcgagaaagcgcagccaggcggctgctcggcgttctctcaggtgactgctcggagttctcccagtgtttggtgttgcaagcaggatccaaaggagacctatagtgactcccaggagctcttagtgaccaagtgaaggtacctgtggggctcattgtgcccattgctctttcactgctttcaactggtagttgtgggttgaagcactggacaatgccacatactttgtggatggtgtgggtcttgggggtcatcatcagcctctccaaggaagaatcctccaatcaggcttctctgtcttgtgaccgcaatggtatctgcaagggcagctcaggatctttaaactccattccctcagggctcacagaagctgtaaaaagccttgacctgtccaacaacaggatcacctacattagcaacagtgacctacagaggtgtgtgaacctccaggctctggtgctgacatccaatggaattaacacaatagaggaagattctttttcttccctgggcagtcttgaacatttagacttatcctataattacttatctaatttatcgtcttcctggttcaagcccctttcttctttaacattcttaaacttactgggaaatccttacaaaaccctaggggaaacatctcttttttctcatctcacaaaattgcaaatcctgagagtgggaaatatggacaccttcactaagattcaaagaaaagattttgctggacttaccttccttgaggaacttgagattgatgcttcagatctacagagctatgagccaaaaagtttgaagtcaattcagaatgtaagtcatctgatccttcatatgaagcagcatattttactgctggagatttttgtagatgttacaagttccgtggaatgtttggaactgcgagatactgatttggacactttccatttttcagaactatccactggtgaaacaaattcattgattaaaaagtttacatttagaaatgtgaaaatcaccgatgaaagtttgtttcaggttatgaaacttttgaatcagatttctggattgttagaattagagtttgatgactgtacccttaatggagttggtaattttagagcatctgataatgacagagttatagatccaggtaaagtggaaacgttaacaatccggaggctgcatattccaaggttttacttattttatgatctgagcactttatattcacttacagaaagagttaaaagaatcacagtagaaaacagtaaagtttttctggttccttgtttactttcacaacatttaaaatcattagaatacttggatctcagtgaaaatttgatggttgaagaatacttgaaaaattcagcctgtgaggatgcctggccctctctacaaactttaattttaaggcaaaatcatttggcatcattggaaaaaaccggagagactttgctcactctgaaaaacttgactaacattgatatcagtaagaatagttttcattctatgcctgaaacttgtcagtggccagaaaagatgaaatatttgaacttatccagcacacgaatacacagtgtaacaggctgcattcccaagacactggaaattttagatgttagcaacaacaatctcaatttattttctttgaatttgccgcaactcaaagaactttatatttccagaaataagttgatgactctaccagatgcctccctcttacccatgttactagtattgaaaatcagtaggaatgcaataactacgttttctaaggagcaacttgactcatttcacacactgaagactttggaagctggtggcaataacttcatttgctcctgtgaattcctctccttcactcaggagcagcaagcactggccaaagtcttgattgattggccagcaaattacctgtgtgactctccatcccatgtgcgtggccagcaggttcaggatgtccgcctctcggtgtcggaatgtcacaggacagcactggtgtctggcatgtgctgtgctctgttcctgctgatcctgctcacgggggtcctgtgccaccgtttccatggcctgtggtatatgaaaatgatgtgggcctggctccaggccaaaaggaagcccaggaaagctcccagcaggaacatctgctatgatgcatttgtttcttacagtgagcgggatgcctactgggtggagaaccttatggtccaggagctggagaacttcaatccccccttcaagttgtgtcttcataagcgggacttcattcctggcaagtggatcattgacaatatcattgactccattgaaaagagccacaaaactgtctttgtgctttctgaaaactttgtgaagagtgagtggtgcaagtatgaactggacttctcccatttccgtctttttgatgagaacaatgatgctgccattctcattcttctggagcccattgagaaaaaagccattccccagcgcttctgcaagctgcggaagataatgaacaccaagacctacctggagtggcccatggacgaggctcagcgggaaggattttgggtaaatctgagagctgcgataaagtcctaggttcccatatttaagaccagtctttgtctagttgggatctttatgtcactagttatagttaagttcattcagacataattatataaaaactacgtggatgtaccgtcatttgaggacttgcttactaaaactacaaaacttcaaattttgtctggggtgctgttttataaacatatgccagatttaaaaattggtttttggtttttcttttttctatgagataaccatgatcataagtctattactgatatctgaatatagtcccttggtatccaagggaattggttgcaggatcctcgtggatatcaaaattcatagatgatcaagtcccttataagagtggcatagtatttgcatataacctgtgtacattctcctgtatactttaaatcatctctagattacttatgatacccaatacaatgtaaatactatgtaaatagttgtactgtctttttatttatattattattgttattttttattttcaaaatttttaaaacatacttttgatccacagttggttgacttcatggatgcagaacccatggatatagagggccaactgtaatctgtagcaactggcttagttcattaggaaacagcacaaatgaacttaagattctcaatgactgtgtcattctttcttcctgctaagagactcctctgtggccacaaaaggcattctctgtcctacctagctgtcacttctctgtgcagctgatctcaagagcaacaaggcaaagtatttggggcactccccaaaacttgttgctattcctagaaaaaagtgctgtgtatttcctattaaactttacaggatgagaaaaaaaaaaaaaaaaa

SEQ ID NO: 1867 - DNA, 946 bp, HOMO SAPIENS
tcagtcttagacgactgcgtcgtgctatgaccggactttttcttgaaaggggatgacagcatgggaggcaatggctccacatgtaaacccgacactgaaagacaaggcactctctccacagcagccccaacaactagccctgcaccctgtctctctaaccaccacaacaaaaaacatttaatccttgccttttgtgctggggttctactgacactgctgctgatagcctttatcttcctcatcataaagagctacagaaaatatcgaagggagaggcttcccatttccccaggcccattgctgagatgggtccctcttctttctggcaccatggcagatcactccaagccccaggccccagatcctcactcagatcctccagccaagctttcatccatcccaggggaatcacttacctatgccagcacaactttcaaactctcagaagaaaagagcaatcacttggctgagaaccattctgcagactttgaccccattgtctatgctcaaattaaagtaacaaactaactcagcttttccaatgaggcttgaatccatttcctctcatctcagccctatcttcacacatcactttcacttttttacaaattttggaccaccacctgtgtgaaactgcagtcggagttgtttagatgtgatctggcaatgctatccagcatctttggagaccaatggtcagtcttttcctggccagaggaaagattgatggccctcccacttgaactgacagcctgtgagccccttgggggcatagactgccttccttggacccttccaaagtgtgtggtacggggctcagtgcacagagtattcacccagcatcatgaatcaacttgggaggagtcaaccaaatgaacaatctaccaaaaatttcaaataaagtcaaaccccccacaaaaaaaaaaaaaaaaaaaaaaaaaaaaaa

SEQ ID NO: 1868 - DNA, 2711 bp, HOMO SAPIENS
tgggcgcggctgcggtttaacccgcggtggcggcggcgacggcggccctggcagggaaggatggagacgctgaaggataagaccctgcaggagctggaggagttgcagaatgactcggaggcgattgaccagctggccctggagtcccctgaggtccaggacctacagctggaacgggagatggcactggccaccaaccggagcctggcagagcggaacttggagttccagggtcccctggagatcagccgctcaaacctctcggatagataccaggagctccggaagctcgtggagcggtgccaggagcagaaggcaaagctggagaaattttcttcagcactgcagccagggaccttgttagaccttctgcaggtggaaggcatgaagatcgaagaagagtccgaggccatggctgagaagttcctggagggcgaggtgcccctggaaacgttcctggagaatttttcctccatgaggatgctgtcccacctgcgccgggttcgcgtggaaaagctccaggaagtggtgaggaagcccagggcttcccaggagctggccggcgatgcccctccaccccgtccaccacccccggtgcgcccagtcccccagggaacaccccctgtggttgaagagcagccgcagccaccattagccatgcctccctaccctttgccctacagcccatcccccagcctgcctgtgggccccactgcccatggagccctgccaccggcccctttcccagtagtgtcccagccctccttctacagcgggcctctgggccccacttacccggcagcccagcttggacccaggggtgctgcgggttactcctggtccccacagaggagcatgccaccccggccgggctatcctgggaccccaatgggtgcctctgggcctgggtaccccttgcggggaggcagggcccccagtcctggttatcctcaacagtccccataccccgcaacaggaggaaaacctccctacccaatacagcctcagctccccagctttccaggccagccccagccctcagtgcccctgcagcccccttatccccccgggcccgcccctccctatgggttcccaccaccgccggggcctgcctggcctgggtattagacacactcctggccctcggcccctccctagtcccacccacgctcaacctttggcccagccatcgccgagattcgagggtcaactggaagtggcgttggtgctccctgtggacttgcgtcggcacccagaggccttggagggacaaggcactgggcggtgtgactggtcatggcacttgctggccttctggccagaggtcctcctggaagcccctcctttcagtgcctggctgcagcggtgctagccaggctggagtccagcacctctcgccggtgtctgtgtgagtgagcgcatgtgcgcatttatgagcatctacttgcggctgcactcagggccatttgaacccagtgcagagttatctctatgaggaggccccgggtctccagccccctccatctcccctggggtttggcatatttgacatggagccccatgccaagggatgcagctgttggtgtctgtccagtccattcaaggctagcctgcccatgcactgtggcaggggttggattggagggagagaacagagttgggaaaaacaacaggtttgagtcctataaagccataatttaactccagtagctgatgtcagacaagcttgtcctatgtcctatttgagtggcagcagcgccagcccagcaagaaggctgggggttgtcaaggttgtccccagaccttgcttgcagtggttggagaacccagggggctgccttgggccctctggccagagggaagcgggcagctctagccctggagattgtggtcacattggggcttgtttaggattggagggccaggtcacctccccagccaccctcccttctctcctctggggtccccactttagggcgactttgcccgaggcccacgcatccatccactcctttagtgccttgaatctcattcacaagcagccccctcccttcccctccccttctcactctgttgatgtaatcctcccacccccagtgtccatcctaagacaggcatcaaaagaggccctaactttacttcccaaatggtgctttttaaaaaacaccatcactacattaggggcaattttttcacacctccctgtcttcagaatgtaaagggtggggattatgtctctgtttaatatgcagccccctgcactgtggggtttggggcatgttcagtaataagaatgaatacaatagacaaagggggtgtgatgagtgttaacttggttgttccagaggtaaaccaggtctcagggaagagcctggagctgctattgcttaggaagttgtacgtgccttgaaatgtccactacctgaggacgcagcatctggtgggcccggggctgctggggccaaggagggaccttgaccttctggtgcctgcccctccccggcctatgtgccatccgcgtgacgctaggtcagcgctgccggttctttaccaaatgtgcttgcttctcctaagttatttataaagagaaatcactaatggactctactggtttgagtgcttctgagctggatgaccgaccgcctgtatgtttgtgtaattaattgccataataaactttgatgagtcacataaaaaaaaaaaaaaaaaaa

SEQ ID NO: 1869 - DNA, 342 bp, HOMO SAPIENS
aagcaaggcagtgggctgatgttcagggtcctattagacacttttctgaggttaaggatggactttttaagaggctcctaagagttacatgtccatggcttgaactttttgtctcaaacaacagaaacataggaactaggaacaataacctaaaactggggctttatgtggttctgggtagcagacaaattgagtcacttgaatttccagagtacaaaagacccctttaaccccttcctgaaaaagatttttcatggtcaggtatttttaaatacttgcatactttgttcagaaatctgtatacattaaaaaaacatgttctctttaagaatattctggcca

SEQ ID NO: 1870 - DNA, 439 bp, HOMO SAPIENS
  misc_feature (38)..(38): n is a, c, g, or t
  misc_feature (301)..(301): n is a, c, g, or t
tgagcccagccgacatttagttattttgtctctttatnacaaatgatagcattacatttatacatatttgtaatccgaaaaggtcaattccttgagtgtttctgtcttgaacttttttctgtaataggcctcccatactcattgcccacagtttgcattcagttttattgtagtgcgtcaggatcattaagagctggagttgctgggataggcctttctcaagaggttctacttgagttggaccttgaggaatctggatgaagagggggataacgaaaaggaggtgggaagggaaaaaggnctgtgtggctgaaggcttgtggttagcaaaagcctgtcatgctttcgagctgcactgcccagcactgtaaccatgagccatgagtatgtgtggctgtgagcacttgatatgtggctaatccagagttgaggtgtgcgg

SEQ ID NO: 1871 - DNA, 2557 bp, HOMO SAPIENS
gacccggcgctagcccgcccgcccgcccgccggctctcgcgcctccttcgcgccggcccttccgcgggtgatcagctggtctgcgctcccctgacgtgggctggggcacgtcaccgccgaatggcagcctccagaaagccaccgcgagtaagggtgaatcaccaggattttcaactgagaaatttaagaataattgaacctaacgaggtgacacactcaggagacacaggtgtggaaacagacggcagaatgcctccaaaggtgacttcagagctgcttcggcagctgagacaagccatgaggaactctgagtatgtgaccgaaccgatccaggcctacatcatcccatcgggagatgctcatcagagtgagtatattgctccatgtgactgtcggcgggcttttgtctctggattcgatggctctgcgggcacagccatcatcacagaagagcatgcagccatgtggactgacgggcgctactttctccaggctgccaagcaaatggacagcaactggacacttatgaagatgggtctgaaggacacaccaactcaggaagactggctggtgagtgtgcttcctgaaggatccagggttggtgtggaccccttgatcattcctacagattattggaagaaaatggccaaagttctgagaagtgccggccatcacctcattcctgtcaaggagaacctcgttgacaaaatctggacagaccgtcctgagcgcccttgcaagcctctcctcacactgggcctggattacacaggcatctcctggaaggacaaggttgcagaccttcggttgaaaatggctgagaggaacgtcatgtggtttgtggtcactgccttggatgagattgcgtggctatttaatctccgaggatcagatgtggagcacaatccagtatttttctcctacgcaatcataggactagagacgatcatgctcttcattgatggtgaccgcatagacgcccccagtgtgaaggagcacctgcttcttgacttgggtctggaagccgaatacaggatccaggtgcatccctacaagtccatcctgagcgagctcaaggccctgtgtgctgacctctccccaagggagaaggtgtgggtcagtgacaaggccagctatgctgtgagcgagaccatccccaaggaccaccgctgctgtatgccttacacccccatctgcatcgccaaagctgtgaagaattcagctgagtcagaaggcatgaggcgggctcacattaaagatgctgttgctctctgtgaactctttaactggctggagaaagaggttcccaaaggtggtgtgacagagatctcagctgctgacaaagctgaggagtttcgcaggcaacaggcagactttgtggacctgagcttcccaacaatttccagtacgggacccaacggcgccatcattcactacgcgccagtccctgagacgaataggaccttgtccctggatgaggtgtaccttattgactcgggtgctcaatacaaggatggcaccacagatgtgacgcggacaatgcattttgggacccctacagcctacgagaaggaatgcttcacatatgtcctcaagggccacatagctgtgagtgcagccgttttcccgactggaaccaaaggtcaccttcttgactcctttgcccgttcagctttatgggattcaggcctagattacttgcacgggactggacatggtgttgggtcttttttgaatgtccatgagggtccttgcggcatcagttacaaaacattctctgatgagcccttggaggcaggcatgattgtcactgatgagcccgggtactatgaagatggggcttttggaattcgcattgagaatgttgtccttgtggttcctgtgaagaccaagtataattttaataaccggggaagcctgacctttgaacctctaacattggttccaattcagaccaaaatgatagatgtggattctcttacagacaaagagtgcgactggctcaacaattaccacctgacctgcagggatgtgattgggaaggaattgcagaaacagggccgccaggaagctctcgagtggctcatcagagagacgcaacccatctccaaacagcattaataaatacctccccggttttgtttttgtaaaatgctctggaggaaggaagaaacgtggcagatccctgacatctttcccctttcctttccttcttccctacctcccctttttactttagactttaagaagaacagaaaatcttcttatcctctttgatattttattgcaaacactcagtcttttatgattttttaattgttgagaacaagccaagaataaaattgctgcaccagaaggagggtccctccaaagttgaacacttggtgaaaggaagatgccccgacttctttggccagtgatggggaatcagtgagtgctccatgatggtcatgttccaggtgctagtacatcattcatgatcaccttaatgctcatgagactatatttatgatcagtgaataaaaatgtcagaactgtgaaaaaaaaaaaaaaaaaa

SEQ ID NO: 1872 - DNA, 3449 bp, HOMO SAPIENS
acgtgggaggaagtgctggtgccctctgccgctgctcccgtctctttggttacgctcgtcagccggtcggccgccgcctccagccgtgtgccgctatgggagtcccggcgttcttccgctggctcagccgcaagtacccgtccatcatagtcaactgcgtggaagagaagccaaaagaatgcaatggtgtaaagattccagttgatgccagtaaacctaatccaaatgatgtggagtttgataatctgtatttggatatgaatggaatcatccatccctgtactcatcctgaagacaaaccagcaccaaaaaatgaagatgaaatgatggttgcaatttttgagtacattgacagacttttcagtattgtaagaccaagaagacttctctacatggcaatagatggagtggcaccacgtgctaaaatgaaccagcagcgttcaaggaggttcagggcatcaaaagaaggaatggaagcagcagtcgagaagcagcgagtcagggaagaaatattggcaaaaggtggctttcttcctccagaagaaataaaagaaagatttgacagcaactgtattacaccaggaactgaattcatggacaatcttgctaaatgccttcgctattacatagctgatcgtttaaataatgaccctgggtggaaaaatttgacagttattttatctgatgctagtgctcctggtgaaggagaacataaaatcatggattacattagaaggcaaagagcccagcctaaccatgacccaaatactcatcattgtttatgtggagcagatgctgatctcattatgcttggccttgccacacatgaaccgaactttaccattattagagaagaattcaaaccaaacaagcccaaaccatgtggtctttgtaatcagtttggacatgaggtcaaagattgtgaaggtttgccaagagaaaagaagggaaagcatgatgaacttgccgatagtcttccttgtgcagaaggagagtttatcttccttcggcttaatgttcttcgtgagtatttggaaagagaactcacaatggccagcctaccattcacatttgatgttgagaggagcattgatgactgggttttcatgtgcttctttgtgggaaatgacttcctccctcatttgccatcgttagagattagggaaaatgcaattgaccgtttggttaacatatacaaaaatgtggtacacaaaactgggggttaccttacagaaagtggttatgtcaatctgcaaagagtacagatgatcatgttagcagttggtgaagttgaggatagcatttttaaaaagagaaaggatgatgaggacagttttagaagacgacagaaagaaaaaagaaagagaatgaagagagatcaaccagctttcactcctagtggaatattaactcctcatgccttgggttcaagaaattcaccaggttctcaagtagccagtaatccgagacaagcagcctatgaaatgaggatgcagaataactctagtccttcgatatctcctaatacgagtttcacatctgatggctccccgtctccattaggaggaattaagcgaaaagcagaagacagtgacagtgaacctgagccagaggataatgtcaggttatgggaagctggctggaagcagcggtactacaagaacaaatttgatgtggatgcagctgatgagaaattccgtcggaaagttgtgcagtcgtacgttgaaggactttgctgggttcttagatattattaccagggctgtgcttcctggaagtggtattatccatttcattatgcaccatttgcttcagactttgaaggcattgcagacatgccatctgattttgagaagggtacgaaaccgtttaaaccactagaacaacttatgggggtatttccagctgcaagtggtaattttctacctccatcatggcggaagctcatgagtgatcctgattctagtataattgacttctatcctgaagattttgctattgatttgaatgggaagaaatatgcatggcaaggtgttgctctcttgccattcgtggatgagcgaaggctacgagctgccctagaagaggtatacccagacctcactccagaagagaccagaagaaacagccttggaggtgatgtcttatttgtggggaaacatcacccactccatgacttcattttagagctgtaccagacaggttccacagagccagtggaggtaccccctgaactatgtcatgggattcaaggaaagttttctttggatgaagaagccattcttccagatcaaatagtatgttctcctgttcctatgttaagggatctgacacagaacactgtagtcagtattaattttaaagacccacagtttgctgaagattacatttttaaagctgtaatgcttccaggagcaagaaagccagcagcagtactgaaacctagtgactgggaaaaatccagcaatggacggcagtggaagcctcagcttggctttaaccgtgaccggaggcctgtgcacctggatcaggcagccttcaggactttgggccatgtgatgccaagaggctcaggaactggcatttacagcaatgctgcaccaccacctgtgacttaccagggaaacttatacaggccgcttttgagaggacaagcccagattccaaaacttatgtcaaatatgaggccccaggattcctggcgaggtcctcctccccttttccagcagcaaaggtttgacagaggcgttggggctgaacctctgctcccatggaaccggatgctgcaaacccagaatgcagccttccagccaaaccagtaccagatgctagctgggcctggtgggtatccacccagacgagatgatcgtggagggagacagggatatcccagagaaggaaggaaataccctttgccaccaccctcaggaagatacaattggaattaagcttttgtaaagctttcccaaatcctttcatcattctacagttttatgctatttgtggaaagatttctttctcaagtagtagtttttaataaaactacagtactttgtgtatttcttttaactgtgtatatttctactgatctgatctcactgtttatgttgctttccaaagatgtatgttgcataatacagtggatctgaatttattattgcttataaaacacatttgatggaataggagtactggtttttcataatggttaaaaatgaaaccagctgtggatttcaaaacacagtgtattctagatcatctaagatccatgctgatttttattgcacaagaattaggtttgaactcgagctggaacctcagcaaactagagtatatattgttcagtatttctttggaaacatttcattaatgtacttgtcttacagaaatttctgaactttagtaaaaaaaaataaagttaaacttttaaaactcaaaaaaaaaaaaaa

SEQ ID NO: 1873 - DNA, 3277 bp, HOMO SAPIENS
cgaacacgccgcggtcctcgtcgtggtgagcgcagccactcaggctggtcctgggggtggggctgtaggggaaagtgctaaagccgctgagtgaagtaagaactctgctagagaggaaatggctgcttcatcatcatcctcctcagctggtggggtcagtggaagttctgtcactggatctggtttcagtgtctcagaccttgccccaccacggaaagcccttttcacctaccccaaaggagctggagagatgttagaagatggctctgagagattcctctgcgaatctgtttttagctatcaagtggcatccacgcttaaacaggtgaaacatgatcagcaagttgctcggatggaaaaactagctggtttggtagaagagctggaggctgacgagtggcggtttaagcccatcgagcagctgctgggattcaccccctcttcaggttgatactgcctggatggtcacctctggtgcgcagcaagtgcaaagccagtgggggactttctcacagcttacatagccatccagagatccacagctacgtcactgaattgttaatgcacatttgtacttggtttctctgtatctattcacaggcaacaaatacttatatgtgtgatctttcagggaatgttttgtttatttgtttttaaaagtattgggaatcagattaagacaatcagtttcagagaaccaggaggtttggggttaagagatactcaaaaattttcacaagccaagtagggcatatatcagatttggccaactgaatggcgtctgtcctgtcatccatatggtgcctggaaatatttaccagtcaaggtcaaggtcagcatctgtggttaaaaatatagcattctgacctaaaaaagttattttgcagatgaatgtgttttcaactcaggacctatccaaatgaggaatttttaaatattcttttttttttcctatttttagacatcaattctatagattctgactttttctaacctcttatagacatgccaaatgctggcaaaaagaagtgctttttggatatggcagcacttgtaaaaataaagcagtaagcaaaatccttttaaacacagaaatcctgagttcttctcattggtggactcaagcaattctgtagcaaataaatcctttgaaagagctccaaattggtggcattatcctttcaaaatctcagggatttgggatgaagtgaagaggtcaaattactttttagaagaagggaatctaaaaaccatctctcctaaacaaatggtagactggctttacttaagggatatttgtctttataggagtacataaatttatcttaatgatatttaagtagtttttttttttttttgggacgaagttttgctcttgttgcccaggctgtatcgcaatggcgcggtctctgctcactgcagcatccgcctcccgggttcgggcggttctcctgcctcagcctcccgagtagctgggattacaggcgcccgccaccacacccagctaattttttgtatatttggtagagacggggtttcaccgtgttgaccaggctggtctcgagcttctggcctcaggtgatccacctgcctcagcctcccaaattgctgggattgcaggcgtgagccaccttgcccagccaatttttttttaaagagacatggtcttgctatgttgcccaggttggtcttgaactcctggcctcaagagatccccccaaccttggcctccaaagtgctgggattacaggcatgagccaccgcgcctggcctcaagtaagtttttataccatgataggggaaaacctggaaggctaagagatgtgctgttttccttcatgggaccccactttccacagtaaacaactggtataatcatttattacgttgtatgcaaattttgccttagacaacatttgtctggttccttattaataacttgcatctgatctgcttagagttgcttaattataagtaaatataatcccagtagcatttagccttaatctcaagagttcaaaatgtttaacacattctacctgacgggaggtggtgacctcattcagtcggttaagagcctgagccctgtgaagttaaacacctgctcatggtcacatagcccaggcagaagaaaatctcggacttggaatagatcccagttgcctgataattcatctcattattgcctctaaagcaaattggagactgggcacagtggctcccacctttaatcccagcacctggggaggctgaggtgagtggatcactagaggtcaggagttcaagaccagtctggccgacatggtgaaactcagtctctattgaaaatacaaaaattagctcagtgtggtggcacacacttgtaatcccagctactcaggaggctgaggcatgagaatcgcttaaacccaggaggcggaggttgcagtgagctgagatcacaccattgcactctagtctgggtgacagagcgagactctgtctcaaaaaaaaaaaaataaagccgggcgtggtggctcacgcctgtaatcccggcactttgggaggctgaggcaggcggattgcctgagatcgggagttcgagaccagcctggccaacatggtgaaaccttgtctctactaaaactacaaaaaaaattggccaggcgtggtggcgggcgcctgtaatcccagctactcgggaggctgaggcagcagaatcgtttgaacccgggaggcggaggttgcagtgagtggagatcgtgcctgtgtgctccagcctgagcaacaagagcgaaactgtctcaaaaaaaagaagaaaataaataaataaaaatcagagcacaagaagtaccagtccaccaactcacattttctatattaataattcttaactaaaagaagttccatattcgacagcattttagttttttaatagtacttattagcatcaaccatcttgataatcaccaagggaaaaattaaaaatacctagactgcaataaacctttaaattggattttcagtgagaatttagaagcaatcactacctttctcgtttcatttgtgtaaccatgcagcataggcactgtgttacatcatctttacgctttggtatttgaacttattacagaattttttctctaaattggatgtttctttatatgaccttggaaactgaagtgatcttagcattaaacaaaaatgctttttgaaaaaaaaaaaaaaaaaaaaaaaaaaaaaaaaaaaaaaaaaaaaaaaaaaaaaaaaaaaaaaaaaaaaaaaaaaaaaaaaaaaa

SEQ ID NO: 1874 - DNA, 6093 bp, HOMO SAPIENS
gcctgccagctagccggagccgcgggtgagcgcggcgagcggcgaccctggtgaggagcgcggcgcgggaggcacgttccttagctccgccgcggccgtcctccgcggctcgaggactccgcttccttccctcccctcccctgcgctccggcctggggtctcggcgcggggagcggagggaagggacgaaggaggagtaggtgaaagcggggtgaggggcggaagggtcccggcgcggggtgaggcgagggctgcctcttgttctcccgccgctgccgccgtctcctggtcgggtgccgcggccagaggcgcgcggggctgccgaggcacccgcactatgcaggcagactgccggccgccgcgatggcgagccgggcggtggtgagagccaggcgctgcccgcagtgtccccaagtccgggccgcggccgccgcccccgcctgggccgcgctccccctctcccgctccctccctccctgctccaactcctcctccttctccatgcctctgttcctcctgctcttacttgtcctgctcctgctgctcgaggacgctggagcccagcaaggtgatggatgtggacacactgtactaggccctgagagtggaacccttacatccataaactacccacagacctatcccaacagcactgtttgtgaatgggagatccgtgtaaagatgggagagagagttcgcatcaaatttggtgactttgacattgaagattctgattcttgtcactttaattacttgagaatttataatggaattggagtcagcagaactgaaataggcaaatactgtggtctggggttgcaaatgaaccattcaattgaatcaaaaggcaatgaaatcacattgctgttcatgagtggaatccatgtttctggacgcggatttttggcctcatactctgttatagataaacaagatctaattacttgtttggacactgcatccaattttttggaacctgagttcagtaagtactgcccagctggttgtctgcttccttttgctgagatatctggaacaattcctcatggatatagagattcctcgccattgtgcatggctggtgtgcatgcaggagtagtgtcaaacacgttgggcggccaaatcagtgttgtaattagtaaaggtatcccctattatgaaagttctttggctaacaacgtcacatctgtggtgggacacttatctacaagtctttttacatttaagacaagtggatgttatggaacactggggatggagtctggtgtgatcgcggatcctcaaataacagcatcatctgtgctggagtggactgaccacacagggcaagagaacagttggaaacccaaaaaagccaggctgaaaaaacctggaccgccttgggctgcttttgccactgatgaataccagtggttacaaatagatttgaataaggaaaagaaaataacaggcattataaccactggatccaccatggtggagcacaattactatgtgtctgcctacagaatcctgtacagtgatgatgggcagaaatggactgtgtacagagagcctggtgtggagcaagataagatatttcaaggaaacaaagattatcaccaggatgtgcgtaataactttttgccaccaattattgcacgttttattagagtgaatcctacccaatggcagcagaaaattgccatgaaaatggagctgctcggatgtcagtttattcctaaaggtcgtcctccaaaacttactcaacctccacctcctcggaacagcaatgacctcaaaaacactacagcccctccaaaaatagccaaaggtcgtgccccaaaatttacgcaaccactacaacctcgcagtagcaatgaatttcctgcacagacagaacaaacaactgccagtcctgatatcagaaatactaccgtaactccaaatgtaaccaaagatgtagcgctggctgcagttcttgtccctgtgctggtcatggtcctcactactctcattctcatattagtgtgtgcttggcactggagaaacagaaagaaaaaaactgaaggcacctatgacttaccttactgggaccgggcaggttggtggaaaggaatgaagcagtttcttcctgcaaaagcagtggaccatgaggaaaccccagttcgctatagcagcagcgaagttaatcacctgagtccaagagaagtcaccacagtgctgcaggctgactctgcagagtatgctcagccactggtaggaggaattgttggtacacttcatcaaagatctacctttaaaccagaagaaggaaaagaagcaggctatgcagacctagatccttacaactcaccagggcaggaagtttatcatgcctatgctgaaccactcccaattacggggcctgagtatgcaaccccaatcatcatggacatgtcagggcaccccacaacttcagttggtcagccctccacatccactttcaaggctacggggaaccaacctcccccactagtgggaacttacaatacacttctctccaggactgacagctgctcctcagcccaggcccagtatgataccccgaaagctgggaagccaggtctacctgccccagacgaattggtgtaccaggtgccacagagcacacaagaagtatcaggagcaggaagggatggggaatgtgatgtttttaaagaaatcctttgaagatgatgctgctttttacaaagcatcgttttaaagcacatggccttttttttttaattattagtggtagtaatatatagaatgtattacataactgtcactgaagtggttggggaaaatgtggtgactgaggtacaggaaactactaatcttgccatcttgctttaaggtgttatggtggcacagttactgctcgcctgttaaatttcaaatgtcctgtttgatactactgtagaacactatttttaatacagaaaaagctccctataatgcacttcagagaaattaaaaatcacagagtatttattaccaatgctgcaggtacattaatgaactcgagatggctctgtaagcctgactggcaataacgcacggtactgttcttgaaatacctaatggcttgaaattctagtctgtttgtgaaagatgggtactatcatgatttcctcttctattcctatattcttttctggattttttttaataattagtgatataagcattgtttttattgcagccatatccacttatccatcttaagatctgtagctgggattttctgacttgtaatgagcagggggattgctttttcactttgtgacactctttagagctttaatgcttcacagtatatggcctggtctcatccttgcgtgttccacttgaggccctttggtgtcttgccccattcttgtgtttataaaatgtttgagtatttctgatgagtgatgcttgccttagtctcatgaattcagatcccttcatgtcctttaagtatgctcctcaatgtgtaaacaggaacaactttatgatttgaaagctttaaaggagattcttctcccacccccaactttatttgcaatgggatttttcctaggagagttatgaaaagttgaaggcttctaagggaatactgtaaacatgacccacttatatttatcacagtgaaaggcaaaattattcactcagaagtaatataaattacctctttaaaaagtaaccagaatttgtcctttttggttttatacattcacaaacatatacatttttcttgagtctcaaggtattttatatttttagtcagaaaaaataatttttcatttcagttttccataaactgttacacaaaatataaacctaacgtgtatttttcaggactgcgtgatcgtgcactttgtgtggtaagaggtttgagtagtcctatatgtcacctagggaacagacattatagcttactagcaaatgaatattcatgccttgtttttgatacctcctggcagcttccatgtcaccacttgttcatacctgcccagagctagttttagacatggcaaaatagaaatcatctgtaatttattagctaacaatgtaaaaccatcttttaaagccttcagactgtcaagacgacatgagcagctcaccatatgataaaaatacataaatttgacattccctcttccataaacctttgtttgtagatttaatgttgaacagtacttttccataaagttctagtcacttctgttggcctgagccaccagattatgatgttgccagaattcactcaatttgaataaagatgaacagtatttgttttcttgtttccatgaattatatcagtattctaaaacatcgcttcagaaagagaactgtttatttctgcaggcttcctgtccttttgtggtatggttttttggccttattttcactggcttttccttctccaaactttgaggcgtgatttcattcattgaagaatcaatacatattttgtttcaaaatgtttgaaacaaaagacatagatggtagacttttattaaaacatatatggatgtggaaagcacatatattaatgcagtcatcccttttcaggtgggaagagagcaaaccagttgattttttaattcatccttagtacacagagaatatacttttcctcaagtaatatacctgtttgaagctttaagagagatgtttttggtaactatttcattttcccaaagaagtttgctattcttgtgttaattgtgtatacctgattgttttttcctggaggtttttgttgttgttgtttagttttgggtttttttttttttaagaggggcaagtgttttctgaaatgatgcatattttaagactcgattcatattgccactgtgctatccttgaactaccaataatttttataaaatatctagtttttactacttttatataaactttactttccagatgaagagctgagcctgattcaaatggtttttctgctttatacttctttttagttcattggtttttatagtagaggttttctattttttttttttttttttttactacatttatatgtctgatacatatacggctttggagacaatcaagtaacaactgaaaatgtgaaagtaaccatatctgacaaaattcccttgaatttttatcctttgcttgcaacatttaagactcaaagtcactggtatattggattaagttttttcctgttaatgcaattatagaaatacatcggagacacaacaaatgtggccattacaggtttcataaaattacactgacttggctgttacttgatcttaggaaacagcacagtttaagatattgtgaattctgacttatactttattaaatgctgtaaatctaaatagatcctgttggatgtgatgggtctagtccagtttatttaagttcatgtttcactgtttgcactttgcattgaacaatgggtttattcgctgatgtaaacggttcgagtgaagaattaatgcagtaagtatgacaacacatacacacttgcctctccccatctccagaagaggggagcagagtccgagcttatctaaatatgaatgtggccacaaagctgtggaaggtgacaaagcttaaacacctttgccctggctctgcattgtcacctagagagcaagaggtctatagaaacatcatgtcacatgaaacgattctctgctttttggttctgaacttgaagtccctaaactgcaaaatctaagagttgggtggttattaaaatgcttttaaagtcaactgtggcaccaattctaatgtaatccaacttgtgactgtttttttttgttttgttttgtttttgtgtgtgtgtgtgtggcactgggaaaagtggaaacaaacatgtattgaaatacatattggaaataaaaatggtttgagcgtcagtgatattctcccagaatgtacttatcttacctcggcatgtactgtagtcactcagtatttgtatatgttgctagaatttagattgtaaaatagtgaaattttaatgtgttcatttgtttttaatgtatatatgtcttgctcagattatttggtttaaataaaacaaccttgaggtttgtagcttttccttatactata

SEQ ID NO: 1875 - DNA, 1965 bp, HOMO SAPIENS
aacgcccgcctgcaaggtcctctgcgccctggcagccaggagtcgccgccacgaccgccgggtctcagtgggtgcctgcgccttctccccgcccgcctgccccgggccatccagaaacttgctctacccgccgcgggtgctcggcagtgctgcccatggcccagcccaggagcctatttagggcgccggacgggctggacagaggcgcggctcagtaattgaaggcctgaaacgcccatgtgccactgactaggaggcttccctgctgcggcacttcatgacccagcggcgcgcggcccagtgaagccaccgtggtgtccagcatggccgcgctgctcctgggcgcggtgctgctggtggcccagccccagctagtgccttcccgccccgccgagctaggccagcaggagcttctgcggaaagcggggaccctccaggatgacgtccgcgatggcgtggccccaaacggctctgcccagcagttgccgcagaccatcatcatcggcgtgcgcaagggcggcacgcgcgcactgctggagatgctcagcctgcaccccgacgtggcggccgcggagaacgaggtccacttcttcgactgggaggagcattacagccacggcttgggctggtacctcagccagatgcccttctcctggccacaccagctcacagtggagaagacccccgcgtatttcacgtcgcccaaagtgcctgagcgagtctacagcatgaacccgtccatccggctgctgctcatcctgcgagacccgtcggagcgcgtgctatctgactacacccaagtgttctacaaccacatgcagaagcacaagccctacccgtccatcgaggagttcctggtgcgcgatggcaggctcaatgtggactacaaggccctcaaccgcagcctctaccacgtgcacatgcagaactggctgcgctttttcccgctgcgccacatccacattgtggacggcgaccgcctcatcagggaccccttccctgagatccaaaaggtcgagaggttcctaaagctgtcgccgcagatcaatgcttcgaacttctactttaacaaaaccaagggcttttactgcctgcgggacagcggccgggaccgctgcttacatgagtccaaaggccgggcgcacccccaagtcgatcccaaactactcaataaactgcacgaatattttcatgagccaaataagaagttcttcgagcttgttggcagaacatttgactggcactgatttgcaataagctaagctcagaaactttcctactgtaagttctggtgtacatctgaggggaaaaagaattttaaaaaagcatttaaggtataatttatttgtaaaatccataaagtacttctgtacagtattagattcacaattgccatatatactagttatatttttctacttgttaaatggagggcattttgtattgtttttcatggttgttaacattgtgtaatatgtctctatatgaaggaactaaactatttcactgaaaaaaaaaaaaagattttttctggagacgctatgtttttttgaatataattaacttgcccccaactcaaaatagctgtctgtgttgcaatcattgcaaaatctaaattcttttgttacttaaaaaaacatgtttttcatggctattacaatcctctctctcccctctcctttctgcattgctctttttaatttttaatgtctcattgtgatcatcagatttatttttacttggattgtaagatttatctcctcggcgattccttgtcatttttggaggtcacagttttactcattcccatgtgtaaacttcaagtaaacaaagcaatattcaggatggagaagcagttagtgactggctagaggtctcttgggatccatcttgacctcaaagaatatttgcacatgcttctgatctcagcagttataataaagaggattaaacccttggccttca

SEQ ID NO: 1876 - DNA, 7229 bp, HOMO SAPIENS
attcccctccacttcttgcctgagccgcctgctcctcttggaaacacgttgagcctccccgctggagagggagccagaacagggaagaacggattcacacaggatggcttgcagaagacgctatttcgtcgagggcgaggcccccagcagtgagactggcacatccctggacagcccctcagcctacccccagggccccttggtgcccggttccagcctgagcccggatcactacgagcacacgtcagtgggagcctatgggctgtactcggggccgccggggcaacagcagcgcacgcggaggcccaagctgcagcactcgacctccatcctgcgcaagcaggctgaggaggaggccatcaagcgctcacgctcactctccgagagctatgagctctcctcggacctgcaggacaagcaggtggagatgctagaacgaaagtatggggggcgcctggtaacccgccatgcggcccgcaccatccagacggcgtttcgccagtaccagatgaacaagaacttcgagcgcttgcgcagctccatgtcagagaaccgcatgtcacgccggattgtgctgtccaacatgaggatgcagttctcctttgaggggcctgagaaagtgcacagctcctacttcgaggggaagcaggtctcagtgactaacgacggctcccagctgggagccctggtgtcccctgagtgtggtgacctcagcgagcccaccaccctcaagtctccggccccctccagtgactttgcggacgccatcaccgagctggaggacgccttctctaggcaagtgaaatcactggccgagtccatcgacgatgccctcaactgccgcagcctgcacactgaggaggcaccggccctggatgcggcgcgggcccgggacaccgaaccccagacagccctgcacggcatggaccaccgcaaactggacgagatgacggcctcgtacagtgatgtcaccctgtacatcgatgaggaggagctgtcgccccctctgcccctctcgcaggcaggggaccggccgtccagcaccgagtcggacctgcggctacgggctgggggcgcagccccagactactgggccctggcccacaaagaggacaaggctgacacggacacgagctgccggagcacgccgtcgctggagcggcaggagcagcggctgcgggtggagcatctgccgctgctcaccatcgagccacccagcgacagctctgtggaccttagtgaccgctcggagcgggggtcactcaagaggcagagtgcttacgagcgcagccttggcgggcagcagggcagtcccaagcatggtccccacagcggcgcccccaagagcctcccccgggaggagcctgagttgcggccccggccccccaggcccctggacagccacttggccatcaatggctcagccaaccggcagagcaagtctgagtcggactactcagacggtgacaatgacagcatcaacagcacgtccaactccaacgataccatcaactgcagctccgagtcatcgtcccgtgacagcctgcgggagcagacgctcagcaagcagacctaccacaaggaggcccgcaacagctgggactcgcctgcctttagcaacgatgtcatccgcaagaggcactaccgcatcggcctgaacctcttcaacaagaagcctgagaagggagtccagtacctcatcgagcgtggctttgtgcccgacacgcccgtcggggtggcccacttcctgctgcagcgcaagggcctcagccggcagatgatcggcgagttcctgggcaaccggcagaagcagttcaaccgtgacgtgctcgactgcgtcgtggacgagatggacttctctaccatggagctggatgaggccctcaggaaattccaggcgcacatccgtgtccaaggggaggctcagaaagtggagcggctcatagaggcgttcagccagcgctactgcatctgcaaccctggggtggtgcggcaattccggaacccagacaccattttcatcctggccttcgccatcatcctgctgaacaccgacatgtacagccccaatgtcaagcccgagcggaaaatgaagctagaggacttcatcaagaacctccgaggtgtggacgatggtgaggacattccccgtgagatgctgatggggatctatgaacggatccgtaagcgagagctaaagaccaatgaggaccatgtgtcccaggtgcagaaggtggagaagctcattgtggggaaaaagccgatcggatccctgcatcccgggctcggctgtgtgctctctctgccccaccgtcggttggtctgctactgccggctctttgaggttccagacccaaacaagccccagaaactcggactacaccagcgagaaatcttcctgttcaacgacctcctggtggtcaccaagatcttccagaagaagaagaactcggtgacgtacagcttccgacagtccttctccttgtacggcatgcaggtcctgctcttcgagaaccagtactaccccaatggcatccggctcacctcgtctgtccccggagcagatatcaaagtgttaataaacttcaacgcccccaaccctcaagaccggaagaaattcaccgatgacctgcgggagtccattgcggaagtccaagagatggagaagcacaggatagagtcggagctcgagaagcagaaaggcgtcgtgcggcccagcatgtcccagtgctctagcctcaaaaaggagtcgggcaacggaacactgagccgggcctgcctggacgacagctatgccagcggtgagggcctcaagcgcagcgccctcagcagctccctgcgggacctctcggaagccgggaagcgagggcgtcgcagcagtgcgggatcgctagagagcaatgtggaagggtccatcattagcagtcctcacatgcgccggagagctacatcaacacgagagtgtccatctcgcccacaccagactatgcccaactcatcttccctcctgggctccttattcgggagcaagagagggaagccccctccccaggcccacctgccctcagccccagccctgccacccccccacccaccggtggtcctgcctcacttgcagcactctgtggctggccaccacctggggcccccagaggggctgccgcaggccgccatgcacgggcatcacacccagtactgccacatgcagaaccctcccccgtaccaccatcaccaccaccaccacccaccccagcacatccagcacgcacaccagtaccaccacggcccccatgggggccacccagcctacggggcccatgcccacggccacccgccgctgccctcggcccacgtggggcacacagtgcaccaccatgggcagccccctgccccgccgccccccaccagcagcaaggccaaacccagcggcatcagcacaattgtgtagacagcctgggtaggggtcccaggctccctgaaacacctgcacaccacacagggcacgcccgggggtcgccagccgcacaccaaacccggggcacttctgttgccatctctcccctctgcccctcacggcccaaccggagccccaggagcccacagggctggtgttgtgtggaacaaaggcccagatttcatttcttgttggcaccctgggctctgctcacctcagtctgagggatgggtgggcctcagacaccatcagccttgaaacggtgagccagccaagtagtgttgaactgcctcccccactccagctctcagctccctgtgccctaatgtacatgcatatgaaaacccaacctagaaaacgaagaaatgagatacaaaaacagacaaaacaaaccccaaaacttgctgcattattgctcttttattgacaatgggcaaaaaaataagtagacctgatatggttgatgaaaatacgtaagtaaactttatataaatatataaatatataaatatatatatatatatactgtataggtagtacttgtgtgtgaaaggcaggcgtttcagtccacattagcaatacccaccttacaaggagctccacttacctaataggaagacagtaccttagctgggtgtgtgagacaatagaccaaaccctaaatgctaggaacaaattcagatacttcatattttcatacaaagaagtccctctaggactggctaaaatctttacacaatcattactaactgtgccaagtaacatagcatctaactgtttaaaaagtccagtattgctttgtataaatccttattttattaacagaatactatcataaatagtattataatgctgttatttcaggtaagcaaatagctaaactgcagtacactctacagtagcaactcaggacagctggttacaagctggttgtcttaggacattggttacacggattcttagacactttaatggctgcgataactgtgactctccatgatccatgtttcttttatgcgcatatgatttgacgcacactcattcagagtcctccgagaggggcacccatacacggcagaagtgttcatctccaacatgaaagtgaccagctctcatcctcgtctccccaacaccataacgtcctcatcccgcctccaacccacaccaggccgaagccctcagagagtgttttcatcaggaaccactctcgaacctgaaggttgactttagcgtttagcaacccagggcggtgtgtgtgtttcccgttttgttttctgagtggtagcagtgatcaccgtaattccatgtagccatgtgctagcagaacccctgtgtcctcaccgtggcccgtgtgaccccagccgacgagtgcccggcggagcccccgctgccttcccatggtccagtgagctgccagggcatcacatgactctcagctgtgctcttgtcgcttctgtgttgtggtgacaccatgcgctccccagggccagacctgcacgcggcaggtctgtgcccgagtcacccacgggccatactttgtagtttcagcctttcgagccactgcagccgtcagtgctgtgctcctaagccatgggacccgaggactgccccccggcgcctgcccaggcggaggccctttcagaaagggcgaagctcacgcctgactctgcgggccgcggggccgcgttcccagtggacagcgtggtgagccgtggccggacggcaggaggagaggggagccccctctggctgtgtgtcaccttggctggctggctggccagggttttgccgatttccctcctcacatccctcccaccctcggtcatatcattgagatcaccgtaccagcaaatctgcaaaccaagcactttgttaatctccagagagagcaaatacagcaatctagagtttagcctttttaaaaatgtgactttaacccgcccacctgtgtcctcccattggcgtggcatttctttggtgtctgctcagaaagaaacagcatgggaccgtgtgattgggtccaggctgggctgtcagggaagcgccctggtgtctccgactcatcaattctcgggtcttttttaaaagccaggctccccaaagcactctgtctcgcaattttgaggaggctgttccgacctggaagcgttaaactgctgcatgtcatctggcgtcagctgtgaggctgcgctctgcgtgttgtgcgtttgcaaaatgtattggcgtgactgtaaacacatcgttgaagtaaagcgattacatattgagtatgtcagcttttctcaccctcttctgtgctgggaggagagtctaactgtaacctttaggttgttccagaaaagattcaggccgtttggcacagaattgctctttctgaagggtagcagtaatgaataggaacagacagaaaaccccaggaggggctttcaggaaactctccctctccatcgccatcctgcaagctccacagcctcgggctgccagcctgtggcactgtcctcggtgtgtcctggagctgtgctgggcagcagggcctcgcgtaaggaactgctggaacccactgagcccttcccggggtttcccgccgcactcagtgtgttccttcaggctagtgaggtttcattctgttttatttgcaagcttatcaaaagtttgtggaagatacattgttgggttccagaggctggagtcatgctgcccacatcttgtttgggaaagcaaaagctcccagtgagctggtgtccccgtgtgtctttcatgggactgtcccctttagagatcccacctgtcagagccacagcttcggggtcctgtcatcacatcccctgggaggggaggcaggaggaggccgagggccccaggatgtctgcctggtcccttctcactgtgaggacgcccttggcacacctttctcaagtcacacaaattactgcagttacatacagaattgctgacaggagcaggagacgctgagggaaacagctggcaatgtgacaaaagtcttttctgggacaacaatcaaatcatgtatttgtatttttttaagtttaccaatgaattgtacaacaatgtaaaaataaagttcatcctaatatgctgtgcacatcttgcttaaaaatgtcttcagcacccagtgcagtgatctttccctcacacactgcatgcagcaggagcctcttgtttttcttaatgagctgaaaagacagcagatgttcacagctgatgctgggtgttgactcagcgccacgggaagctctgtgcccgcaggtaagcacgcacagtcttacagttctccttgtaaaatatcatcacccttcctgcctgagaaacgagtacatttgtattttatgtaacaacaatagtcaaggcagcattgcaacactgagcagggtgaggtgggggtgctgagcacaggacaagagggaggaggcctgccctccattcagatgcatctgcatcgcccttctgtgtgcagtcacatcgagactgcacacagcatgcatctcctcttggaaaatatcttttgcctccgagttgttttaagcaattagaatcaggtcctgaatccccagactgttcagagacttcaagggacacctccctcacaagaagcctggcacccccactgtgtacctttgagaggaaaggagtgcgtttgttttcatctgcattctgtttgtcagtggcaacagactctatcaatgtaaaaccatggttgtgatcatgtggggaaatcaaataaatcctttgaaactctaaaaaaaaaaaaaaaaaa

SEQ ID NO: 1877 - DNA, 2261 bp, HOMO SAPIENS
cgctgggaagagactgtgcccctgcagctcccctgtcaccggctccaaggagcgtcgggctccccccgcccagccctgcagcacccatccggcaacgccagactcggcgcaacgggggcagctgcgactttaaatctctcagatccgcggcctgagggctgccgccaccgagaaatggaggcacagagctgtgaacaagagaccacggctcgccgaaatggcggtgccaggagcctgaaagggaatgcagccggcggggttgtcaaggacaacatttgttttggcgcaaccagcggtgccgtcaccaagaaaccgtcgactctgagaaaaaaagagaagttcggctaccgagaaactccgtgcagcaagtgctgtgacagcaaaaccgccggcttcgcgccgctggcgaaagagccaacggaaacgccgggtgctgcgaccgcgaagccggcactagagggcctcggatggagaaagccccgcaccgagacgaggaaactgtgcacagcacgactagcagttgacacaaacagaaaagtgtctcgtctgctctctgggagaaagcgtggatcaaaaccagcaactcagtggagagaaccccgcagccactgaagaagttgcccacgtggcggtggggccagagaaacaccgcgatttcgacgacagccgtagggataccacagagaaacatgcgcggccacagaagtacatccagctccgcgcaatcagtggttctgcgatccagaaaccgccagctgggctagactagaaacttctaaaaaactgtcgtcccatagcagctttcctaaccacgacagacagtcgcctttagagagcacctaacggtgctgagaccggcctgggccagcaaaagcgcagagcggtgccagtgccaagaaacgcccgacttggtgaaaccaaccttgtgaccaccgattccactggcttcgcaggacgcaacgggcgaaggcgcggcggagaaaccgcaggctcccttcaccgattatgctgcgggctggggatggtggggggcacccgcgaaattgtgaaaccagcggcgctgggacccagcgatcagctgcccgtagcaaatgtctgtgcagttgcaaaagataatttttggccgtgagaaggttgccgccagagagcgtccgataacgctgacaaaggcgtggcgttgccagtgagaaacagccggcgctgggaaaggaacggtgcagcgaccgaccaactgcgcgctcggtgccaccaaagtgctactggctctacccactctgtcccccacgggcttagggaagtctgatgtctttttcttttcttttttcctctgtcgcctaggctggtgcagtggtgtcatcttggctcagtgcagcctcgacttcctgggatccagcgatcctcccgcttcagcctctagagtagccgagaccacaggtcacccctcgctgccaggctctcttcccggtccagagcccacaggatcctacaggaggggccaacaactgcttgcctttgaaacttgaaactctcggtctaaggttccttaggagcgtaaaaggcacagcgttttctgatcgcagcttcaggtctcccgcccctgtcccggtacctctcctgcaggacggaactctgtgggaacgctcgttgattctgatggttaactgtcagatatccttgatattggacataggatttggaagagggcaggagagaaaaatgaactgcaagactccagcacaagaggtgggattgctggcagatgtctgctccctctccaaacctaatgaacatctcaaagtgccatccactttcctatacccttgatctgtgaaatggatcactgacgctttctctgtctttccggaaatgcaaaacaggtgaattttcaagcgcttgaattgtctctcacacttttcagtcaagagtggggctataaactccttcctcataggaaataaggaactgccactgcttggaagtaaaacgtatttttcccataagctttcacatttcccaaaaaaaattatacatccagatgtaatccccctaagaggcttacagaccctaccaggagcgttcccacgcgaacgcatcatctcccaatcggatcctgaaaacaccatgcaaccaattccatccttttctggatcaacctgggcagaggacaggtgcagaggagcccagagaagggccttgacaagtcaggagacccaatttggggtcgcaattgtcactcactccccaggcgtttgctttgatca

SEQ ID NO: 1878 - DNA, 4749 bp, HOMO SAPIENS
acagagcgtgttgttagagctgtgctgagcgggtgtttgggttgttggctgctttcttccccctttctcacacacttgtatattattttgaggtggtgttcgcagagtttgaaaggagagagaattaaaaaaaaaagccgcaagcgtttcactcttttatttttataatccccttcaatttggggttaaaaaaaagacaagaaaacaggaaggaagagaaataaggaaatgagatgtggtaaaagaagctaaaaggtgccttttaaaagatcgttgctgtgaagtgaaaaaaatctccagagaaaccaaaaagcaccgccgagacctcttccgaaccaaaggagtttgtgtttgcttttagggaagaagaaagatcattcattcggaggaataacaaccaattaaaagacaaataaaaaaagtttggagtgggacgcagagcgagcgagaggagctgccggcgggcggtggggcgcggagcccgcactttcccggccgggtgagcggcggccgcggcgccgggctcggcgggtgcgcctcggcggagcgaacgtcggagcgttgccttgggagacgcgcgccggacaatgcccgcggcgggccagtgacgcccgcggggaatgcggagcggcccggcagccggcacccagccgccgccgcgcgttcctgccgcccgtgtcacgcgagacccggcgggggccgggaccgcccgagccgcccctcagaccgagccggccgcctccgctgccgcggccgcctcctcttcggggtcattaaagccaatgagccgcgcgcctctgccgagcgcagccaactaaatcggcttggatgattcgcgacctgagcaagatgtacccgcagaccagacacccggcaccgcatcagcctgctcaaccctttaaatttacaatttccgaatcctgtgatcggattaaggaagagtttcagtttttacaggctcaataccacagtctgaagctggaatgtgagaaactcgccagtgagaagacagagatgcagcggcattatgtcatgtattatgaaatgtcctatgggttgaatatagaaatgcacaagcaggcagagattgtcaagaggctgaatgctatctgtgcacaagtcattcctttcctgtcccaagagcaccagcaacaagtggtgcaggctgtggaacgggccaagcaggtgaccatggcagaactgaacgccatcattgggcaacaactccaggcccagcatttatcacatggacatggtctccccgtacctctgactccacacccttcagggctccagccccctgccattccacccatcggtagcagtgccgggcttctggccctctccagtgctctaggaggtcagtcccatcttccaattaaagatgagaagaagcaccatgacaatgatcaccaaagagacagagactccatcaagagctcttcagtatccccatcagccagtttccgaggtgctgagaagcacagaaactccgcagactactcctcagagagcaaaaagcagaaaactgaagaaaaggaaattgcagctcgttatgacagcgatggtgagaaaagtgatgacaacttggtggttgacgtttccaatgaggatccatcttcccctcgagggagcccagcacattcccccagagagaatggcctagacaagacacgcctgctcaagaaagatgccccgattagtccagcctctattgcatcttccagcagtactccctcctccaaatccaaagaacttagccttaatgaaaaatctactactcccgtctcaaagtccaatacccctactccacgaactgatgcgcccaccccaggcagtaactctactcccggattgaggcctgtacctggaaaaccaccaggagttgaccctttggcctcaagcctaaggaccccaatggcagtaccttgtccatatccaactccatttgggattgtgccccatgctggaatgaacggagagctgaccagccccggagcggcctacgctgggctccacaacatctcccctcagatgagcgcagctgctgccgccgccgctgctgctgctgcctatgggagatcaccagtggtgggatttgatccacaccatcacatgcgtgtgccagcaatacctccaaacctgacaggcattccaggaggaaaaccagcatactccttccatgttagcgcagatggtcagatgcagcctgtcccttttccacccgacgccctcatcggacctggaatcccccggcatgctcgccagatcaacaccctcaaccacggggaggtggtgtgcgcggtgaccatcagcaaccccacgagacacgtgtacacgggtgggaagggctgcgtcaaggtctgggacatcagccacccaggcaataagagtcctgtctcccagctcgactgtctgaacagggataactacatccgttcctgcagattgctccctgatggtcgcaccctaattgttggaggggaagccagtactttgtccatttgggacctggcggctccaaccccacgcatcaaggcagagctgacatcctcggcccccgcctgctatgccctggccatcagccccgattccaaggtctgcttctcatgctgcagcgacggcaacatcgctgtgtgggatctgcacaaccagaccttggtgaggcaattccagggccacacagatggagccagctgtattgacatttctaatgatggcaccaagctctggacaggtggtttggacaacacggtcaggtcctgggacctgcgcgaggggcggcagctgcagcagcacgacttcacctcccagatcttttctctgggctactgcccaactggagagtggcttgcagtggggatggagaacagcaatgtggaagttttgcatgtcaccaagccagacaaataccaactacatcttcatgagagctgtgtgctgtcgctcaagtttgcccattgtggcaaatggtttgtaagcactggaaaggacaaccttctgaatgcctggagaacaccttatggggccagtatattccagtccaaagaatcctcatcggtgcttagctgtgacatctccgtggacgacaaatacattgtcactggctctggggataagaaggccacagtttatgaagttatttattaaagacaaatcttcatgcagactggacttctcctcctggtagcactttgctctgtcatcctttttgttcacccccatccccgcatctaaaaccaaggatttcagatactcattgcagttgtggagtttaatcccctttcttaacctcacttcccacttgctattgaattgtgaatagtcattaaaaacctgtgataccaaatcttcagctgtctacttggaagaacatggaataagcatacttaacagtgaaaagaatctttaattatgtattatatctgtaatatatttattttgtttaaagaaggctttctaacaatgactgactaaataaagctgtctgctcctgcattgataatgaaggtgcgttgtatttgatacccctccccccctttttttggcaaaggaggggaaaggaaggtttaaaataattgatttaaaatgtcactaagtgtagactgatgactgtatagagatgtgaaatgtataattacacatggaagcaatatgttgctgtgttgttattaggttttttttgtttttgttttctacatcttttaaagacttttggaaatttggctgaacaattagaacacaacaggccaactcatactcatttggatctatttagacaacgttaaccaatatatctatagctttagattatattcgataaaagtaattggactttttttctttttttgactcgttgacaagtgtctttgtaatatgtttttagttccctttttttgttgtattataggcagatgaacaaattaaatttggcctcaaagagagaacttactcccttctggatatttttgccacatttctttgcaaaaggagatatatatatctttagtcagttttgttgttatgagaaattatgggttattttgtggcatgctctttgggagctgcacagttatggggaggactcccactgctgtgcaagttaagtcttttacaaaacaaggacagcagaggagggtttgcagagacctccctctgaaaaacacaaagaatggactctctcctgggatgaggacttgctttctttacctccggttctttccatgtcttagttggatgtccctgaaatggacacaggctgtgccattgtgccagaaacattgtgttatcttttatgttgttgttgttgctgttaaactataatatgtgacttctttttttattattttttgtttgaatgctttaaaaatcttttaagtctgtggatctgctgatgtacagtgcctttgctgctatggatcaaaatcaaaagaaccgtgtagatatactttattgtataagtagaaaattacttaatttcatactagaaatggatggatgctgcaagttgaaatggactgtccattgacgttcctaatgtggtagcagaaaaaaaaaaatggtgtcttaagtgcttagtgtttgatgtcattaacagtttcgtaaaactctacagtgtagaaagattttgatactaaactgtgcgttgtacatagttctaatgcattgtattgaccaccagtacttctataatggtagattgtttgtgaattcagacttttaagcattaaacataaataacttctagaa

SEQ ID NO: 1879 - DNA, 579 bp, HOMO SAPIENS
gcgcggtcgctcagcagtgacgtgacacgcagcccacggtctgtactgacgcgccctcgcttcttcctctttctcgactccatcttcgcggtagctgggaccgccgttcagtcgccaatatgcagctctttgtccgcgcccaggagctacacaccttcgaggtgaccggccaggaaacggtcgcccagatcaaggctcatgtagcctcactggagggcattgccccggaagatcaagtcgtgctcctggcaggcgcgcccctggaggatgaggccactctgggccagtgcggggtggaggccctgactaccctggaagtagcaggccgcatgcttggaggtaaagtccatggttccctggcccgtgctggaaaagtgagaggtcagactcctaaggtggccaaacaggagaagaagaagaagaagacaggtcgggctaagcggcggatgcagtacaaccggcgctttgtcaacgttgtgcccacctttggcaagaagaagggccccaatgccaactcttaagtcttttgtaattctggctttctctaataaaaaagccacttagttcagtcatcgaaaa

SEQ ID NO: 1880 - DNA, 6121 bp, HOMO SAPIENS
gaattcccttttctgggcaccgccttctgctagggggttgtagatgaaagtgcctgctcccagagaagcttgtctaacctagcacagtttctaagctacccaggctgccagaccgagcgaccgtgctgccatggacacagactctcagcgttctcatctctcttccttcaccatgaagctgatggacaaattccactcacccaaaatcaagagaacgccatcaaagaagggaaaaccagctgaggtgtccgtaaagattccagagaagcctgtgaacaaagaggcaacagacagatttctaccagagggctaccctctccccttggatctggagcagcaggcagtagaatttatgtccaccagtgctgtggcttccaggtctcaaaggcagaagaacctgagctggctggaggagaaagagaaggaagttgtcagtgccctgcgctactttaagaccattgtggacaaaatggcaattgataagaaggtactggagatgcttccagggtcagccagcaaggtgctggaggccatcttacccctggtgcagaacgatcctcgaattcagcacagctcagccctctcttcctgctatagccgagtgtaccaaagcctcgccaacctcattcgctggtctgaccaagtgatgctggaaggcgtgaactcagaagacaaggagatggtgacgactgtgaagggggtcatcaaggctgtgctggatggagtgaaggagctggtcaggctcaccatcgagaagcagggacgtccgtctccgacgagccccgtgaagcccagttcccctgccagcaagcctgatggcccagcagagctccccctgacagaccgcgaggtagagatcctaaacaagacgactgggatgtcacagtcaactgagctcctcccagatgccacggatgaagaggtcgcgccccccaagcctcctctgcctggcattcgggtggttgataatagtcctccaccagcattgccacccaagaaaagacagtcggcgccgtcccctacccgagtggctgtggtggcccccatgagccgagccaccagtggctccagtttgcctgttggaatcaataggcaggattttgatgttgactgttacgcacagaggcgactgtcaggaggcagccactcatatggtggagagtcgccccgcctctccccctgcagcagcataggcaagctcagcaagtcagacgagcagctgtcctctctggacagggacagtgggcagtgctcccggaacacaagctgtgaaacactagaccactatgatcccgactatgaattcctccagcaagacctctctaacgcagaccagatacctcagcagacggcctggaaccttagcccgttgccagagtctttgggggagtctgggtctccatttcttggccctcctttccagctgcctcttggcggccatccccagccagacggacctctggccccagggcagcagacagatacgccacctgctctccccgagaagaagcgcaggagcgcagcctcccagacggcggacggctctggctgcagggtgtcctacgagcggcatccctcgcagtatgacaacatctctggggaggacctgcagagcacagccccgatcccatccgtcccctacgcgccctttgctgctattctgccctttcagcatggaggttcctcagcccctgtcgaatttgtgggtgattttactgctcctgagtcaaccggtgacccagaaaaaccacctcctctaccagagaagaaaaacaaacacatgctggcctacatgcagttgctggaggactactcggagccgcagccctctatgttctaccagacgccacagaacgagcacatctaccagcagaagaacaagctcctcatggaggtatacggcttcagcgactccttcagtggggtggactccgtgcaggagctggccccgccgcccgccctaccccccaagcagcggcagctggagccaccggctgggaaagacggacatcccagagatccctcagcggtcagcggcgtccctgggaaggacagcagagacggcagtgagagggccccaaagtcaccagatgctctggagtcggctcagtcggaggaggaagtggacgagctgtccctcattgaccacaacgaaattatgtccaggctgacgctcaagcaggagggtgatgacgggccggacgtccgcggaggatctggggacatcttactggtccatgctactgagactgacaggaaagatttggtgttgtactgcgaggcattcctgaccacctacaggaccttcatctccccagaggagctcatcaagaagctgcagtacagatatgagaaattctctccctttgccgacacattcaagaagcgcgtcagcaagaacacgttcttcgtgctggtacgggtggtggatgagctctgcctggtggagttgacagaagagatcctgaagctgctgatggaactggtcttccgcctggtgtgcaatggggagctgagcctggcccgtgtgctccggaagaacatcctggacaaggtggaccagaagaagctactcaggtgtgccacctccagccagcccctggcagcccggggggtagcagccaggccggggaccttgcacgactttcacagccatgagatagcggagcagctaacgctgctggatgctgagctcttctataaaatagagattcctgaggttttgctttgggcaaaagagcagaatgaggagaagagccccaacttgacccagttcacggagcacttcaacaacatgtcctactgggtccggtccataatcatgttacaggaaaaggcccaggacagggaacggctgctcttgaagttcatcaagatcatgaagcacttgcggaagctgaataacttcaactcctacttggccatcctctctgccctggactcggcgcccatccgcaggctggagtggcagaagcagacttcagagggcctggccgagtactgcacactgatcgacagctcgtcctccttccgagcctaccgggccgccctctcggaggtggaaccgccgtgcatcccgtacctggggctgatcctgcaggacctgaccttcgttcacctgggaaacccagactacatcgacgggaaagtgaacttctccaagcggtggcagcagttcaacatcctcgacagcatgcgctgcttccagcaggcgcactatgacatgcggaggaacgacgacattataaacttcttcaatgacttcagtgaccacctggctgaggaggccctatgggaactgtctctgaaaattaaacccaggaacataacaaggagaaaaacagaccgggaagagaagacctaggagcagacgccgggatccaggagaatgctcgaggggcgcagagggcagctcccagaccggagaggaccttggacctgttaggcgcatggcaggagtcccggcctcggagccatgaggctggccagccctcagcggggccgggcgggagctggagcctgccagccgcttcctgcctccttcctctgtgggagcagacccgtgggcctcagggcagccagcaggcaggtcttgttgccaatttacaaaccggtggttttctggtttggttttgttttctgcttttacttccatctctcccctcttgaccttccacccactcccctccagggagagagcagcagagacctcatcagcagaccaaggaagtggtgggtgctccccctccctaagctccagggtccctgaatcttctgaaatctcaaatgagtggaggcctcctggggtggcctgtcctgcaggggccctggaatgggggcaagcagctgggtgggcagaatgcagagtagactcgggggaggatcctttcactttccgcttccccttctgatgcatggaggatggtgtgagcttttcagcaggcccggaaaggtacgcaggtgacgccttagcagccccgcagctggtgctctgccccgcggtactggcgccatcagggcctcccttgcccgcctgagagcagcagcagtctctgtcatcccgtcgccccttaccccccaccccaggccactgggcccctcccacaccacctggggagctgagaagaggaggctggagtaagggaggacttgatcatccaagaaatactttttattgctgggagtcttctgaacctcaccaaactgaggccagagctgagctcctgggggagttaattcagaggggagaggccagcacctccctcctccatcgctcgctgtgtgccttaaactccatctcatgtccctccccatcccctggctttccctccctccttgccccatcctgggccagccagcagggctcctcctctggctcttcagacctttcagccagtgctgtcagtgcccctgggagggaagggcatccctgaggcacccgaatggtccctcagggtgcagggaggcagaagcctggccacagaggagcctcctaaggcagcagctgcagcaagcgcaccctctccccactctccccacgccagagcggcttccagagcagatgctgtttccatcctcctcgtcaaaaccattctcgctgctgagcttgacaatctgggcaaggcttgtggggcgcttgacaaacagaatctgccctgtgccgcctggttccgtggcctccagcatgagcctgcaggcagggcgctgcgggaacccagttgtgctgccccagcccatgcctccgggtctgctgtgcatgaatgagtgctcacttgtcccgggtttaggacgtggtcaagtgaacagcagggtctaactgtgcttacttagcccagttcaaacagaacaaaggaaaaatatagaaagcaacatctgttgatcatttaggtttttttttaaaccaccatgtcactttgagtccttcatgggtttttgaacagcatttatcaagaagaaaatgtgggctttttcccctctcccgtgttttgtttgtcctgtagatagagggaggaaagccgtgcagtggcaggcgggaccccctctggtggcgggaccccctcttgcggtggtcttgcggggccagccgggacctgtcactttattatttaaggagtgtgtgtgtagagtcgctggcttattaacagtattgtgtgtgggttgggtttttagtttgttccttctttttgaagtcccttcatttcaatccttgactctctctccccttcccttgcccagctctgttgaatgctgctgtgcgcgtgtgagggccgctctgcacacagggcccttgggttgtgtgaactgaaattctccctgtatttgtgagactcgcaggagtccccatctgtagcacaggcaatgccagtgccatgctgcagcctcagaaaccaggcctctcactccagcagcaggcagaaccgtgtctgtggtcgggtgctgtccacagctctgtctgccttgttcttgggcttgagctggatagaggtggggtctcttcaccttccctgaattcagaacagaccctgtgcctggccccagtgtgcccaggcaattccccaggccctcactgggagcccttggtgttctgagcagcagggcccaggcagcacatgagcagtgcccaggggctccctgcgtgaggacggcaaggtgcgatgtatgtctaacttattgatggcaggcagccccctgtgccccctaagcctggccctggttattgctgagctctgtgctcagtgctgcggcctggccgtggctcgtctgttcctttggggggcccgggcgggttgtgggaatcagtcttcacagacagacgtgagccaggcggaggactcgttccttgcagaggtcagtcctcacctgcaggtgtcggggtgggggggggcaaggaggggcaggcacacaccatgtctgacctgaacccgattctggggagcatcttcccgctccggccccacgacctccacagggttacattgtaatatatatgccccagctaacctgtctgatggtggcatcttcctgcagacatttcaaacatgtaacttttatatgaaaaaaaataaacacagatgaaagctgcccaatgccaaaaaaaaaaaaaaaaaaaaaaaaaaaaaaa

SEQ ID NO: 1881 - DNA, 3710 bp, HOMO SAPIENS; identical to SEQ ID NO: 92

SEQ ID NO: 1882 - DNA, 435 bp, HOMO SAPIENS
tgttctagatagcttcttcactcacatgtctagcacctagctaggatggctccaatggccgggggttagaacagcttgactgatatcatatgtgtggggccttggttctcacaattgattgggttctttggtttttctacaagtagttctaggacttctgttccacatggccaatccatgtagcctctacagaaagatagccgacttcttacatgcaagctcagagttcccaagaagattaggtttagaactaacacactgtcacttctgttacattctatcagataaaggaaataacaggcctagagtcaagaggaggaaactacataagggtgtaaatactaggaagtaggatgaacctggggccaccaattgatgtaaccaactaccacagattgtcactgggcaaaaataaccacacgctctttacaaggg

SEQ ID NO: 1883 - DNA, 338 bp, HOMO SAPIENS
ggcatcgggaggcctcaggaatgctggaacgttctgtcttgatctggttaatggtcacctgggggcatatttgcataaaaattcaagttgactattctagatttgtgcttcttactttatagaagttatgccctcagtaaacattttgaaaacataaagaccaggcagaggcagggaagtaggcaggtgtgcggcctgtattggtagcagagtcctccctgagggctggatcattagggaggtagtgggcccagggaggaggcacgggaggttaatttagaaaggtggcccaggctgggtcatggtgggcctcagaggccccactaaagaatcagact

SEQ ID NO: 1884 - DNA, 6860 bp, HOMO SAPIENS
gccctgggagaaatcctcccttcactgggagagaacttctctcccagggcggtgcgacccggagctccagcgcccgagtctccacttcgtttgctgaaacttgctttctaccagctaagaaccatgctgcgagtgattgtggaatctgccagcaatatccctaaaacgaaatttggcaagccggatcctattgtttctgtcatttttaaggatgagaaaaagaaaacaaagaaagttgataatgaattgaaccctgtctggaatgagattttggagtttgacttgaggggtataccactggacttttcatcttcccttgggattattgtgaaagattttgagacaattggacaaaataaattaattggcacggcgactgtagccctgaaggacctgactggtgaccagagcagatccctgccgtacaagctgatctccctgctaaatgaaaaagggcaagatactggggccaccattgacttggtgatcggctatgatccgccttctgctccacatccaaatgacctgagcgggcccagcgtgccaggcatgggaggagatggggaagaagatgaaggtgatgaagacaggttggacaatgcagtcaggggccctgggcccaaggggccagttgggacggtgtcggaagctcagcttgctcggaggctcaccaaagtaaagaacagccggcggatgctgtcaaataagccacaggacttccagatccgcgtccgagtgattgagggccgacagttaagtggtaacaacataaggcctgtggtcaaagttcacgtctgtggccagacacaccgaacaagaatcaagagaggaaacaaccctttttttgatgagttgtttttctacaatgtcaacatgaccccttctgaattgatggatgagatcatcagcatccgggtttataattctcactctctgcgggcagattgtctgatgggggaatttaagattgatgttggatttgtttatgatgaacctggccatgctgtcatgagaaagtggcttcttctcaatgacccggaagataccagttcaggttctaaaggttatatgaaagtcagcatgtttgtcctgggaaccggagatgagcctcctcctgagagacgagatcgtgataatgacagtgatgatgtggagagtaatttgttactccctgctggcattgccctccggtgggtgaccttcttgctgaaaatctaccgagctgaggacatcccccagatggatgatgccttctcacagacagtaaaggaaatatttggaggcaatgcagataagaaaaatctcgtggatccttttgtagaagtttcctttgctggaaaaaaggtttgtacaaacataattgagaaaaatgcaaacccagagtggaatcaggtcgtcaatcttcagatcaagtttccttcagtgtgtgaaaaaataaaactaacaatatatgactgggaccgtcttactaaaaatgatgtagttggaacaacatatctacacctctctaaaattgctgcctctggtggggaagtggaagatttctcatcttcgggaactggggctgcatcatatacagtaaacacaggagaaacagaggtaggctttgttccaacgtttggaccttgttacctgaatctttatggaagccccagagagtacacgggattcccagacccctatgatgagctgaatactggaaagggggaaggagttgcctacagaggcaggatcttggttgaattagccacttttcttgagaagacaccaccagataaaaagcttgagcccatttcaaatgatgacctgctggttgttgagaaataccagcgaaggcggaagtacagcctgtctgccgtgtttcattcagccaccatgttgcaagatgttggtgaggccattcagtttgaagtcagcattgggaactatggcaacaagtttgacaccacctgtaagcctttggcatcaacaactcagtacagccgtgctgtatttgatggcaactactattattacttgccttgggcccacaccaagccagttgttaccctgacttcatactgggaggatattagtcatcgcctggatgcggtgaacactctcctagctatggcagaacggctgcaaacaaatatagaagctctaaaatcagggatacaaggtaaaattcctgcaaaccagctggctgaattgtggctgaagctgatagatgaagttatagaagacacgagatacacgttgcctctcacagaaggaaaagccaacgtcacagttctcgatactcagatccgaaagctgcggtccaggtctctctcccaaatacatgaggcggctgtgaggatgaggtcggaagccacagatgtgaagtccacactggcagaaattgaggactggcttgataaattaatgcagctgactgaagagccacagaacagcatgcctgacatcatcatctggatgatccggggagagaagagactggcctatgcacgaattcccgcacatcaggtcttgtactccaccagtggtgagaatgcatctggaaaatactgtgggaaaacccaaaccatctttctgaagtatccacaggagaaaaacaacgggccaaaggtgcctgtggagttgcgagtgaacatctggctaggcttaagtgctgtggagaagaagtttaacagcttcgcagaaggaactttcaccgtctttgctgaaatgtatgaaaatcaagctctcatgtttggaaaatggggtacttctggattagtaggacgtcataagttttctgatgtcacaggaaaaataaaactcaagagggaattttttctgcctccaaaaggctgggaatgggaaggagagtggatagttgatcctgaaagaagcttgctgactgaggcagatgcaggtcacacggagttcactgatgaagtctatcagaacgagagccgctaccccgggggcgactggaagccggccgaggacacctacacggatgcgaacggcgataaagcagcatcacccagcgagttgacttgtcctccaggttgggaatgggaagatgatgcatggtcttatgacataaatcgagcggtggatgagaaaggctgggaatatggaatcaccattcctcctgatcataagcccaaatcctgggttgcagcagagaaaatgtaccacactcatagacggcgaaggctggtccgaaaacgcaagaaagatttaacacagactgcttcaagcaccgcaagggccatggaggaattgcaagaccaagagggctgggaatatgcttctctaattggctggaaatttcactggaaacaacgtagttcagataccttccgccgcagacgctggaggagaaaaatggctccttcagaaacacatggtgcagctgccatctttaaacttgaaggtgcccttggggcagacactaccgaagatggggatgagaagagcctggagaaacagaagcacagtgccaccactgtgttcggagcaaacacccccattgtttcctgcaattttgacagagtctacatctaccatctgcgctgctatgtctatcaagccagaaacctcttggctttagataaggatagcttttcagatccatatgctcatatctgtttcctccatcggagcaaaaccactgagatcatccattcaaccctgaatcccacgtgggaccaaacaattatattcgatgaagttgaaatctatggggaaccccaaacagttctacagaatccacccaaagttatcatggaactttttgacaatgaccaagtgggcaaagatgaatttttaggacgaagcattttctctcctgtggtgaaactgaactcagaaatggacatcacacccaaacttctctggcacccagtaatgaatggagacaaagcctgcggggatgttcttgtaactgcagagctgattctgaggggcaaggatggctccaaccttcccattcttccccctcaaagggcgccaaatctatacatggtcccccaggggatcaggcctgtggtccagctcactgccattgagattctagcttggggcttaagaaatatgaaaaacttccagatggcttctatcacatcccccagtcttgttgtggagtgtggaggagaaagggtggaatcggtggtgatcaaaaaccttaagaagacacccaactttccaagttctgttctcttcatgaaagtgttcttgcccaaggaggaattgtacatgcccccactggtgatcaaggtcatcgaccacaggcagtttgggcggaagcctgtcgtcggccagtgcaccatcgagcgcctggaccgctttcgctgtgacccttatgcagggaaagaggacatcgtcccacagctcaaagcctcccttctgtctgccccaccatgccgggacatcgttatcgaaatggaagacaccaaaccattactggcttctaagctgacagaaaaggaggaagaaatcgtggactggtggagtaaattttatgcttcctcaggggaacatgaaaaatgcggacagtatattcagaaaggctattccaagctcaagatatataattgtgaactagaaaatgtagcagaatttgagggcctgacagacttctcagatacgttcaagttgtaccgaggcaagtcggatgaaaatgaagatccttctgtggttggagagtttaagggctcctttcggatctaccctctgccggatgaccccagcgtgccagcccctcccagacagtttcgggaattacctgacagcgtcccacaggaatgcacggttaggatttacattgttcgaggcttagagctccagccccaggacaacaatggcctgtgtgacccttacataaaaataacactgggcaaaaaagtcattgaagaccgagatcactacattcccaacactctcaacccagtctttggcaggatgtacgaactgagctgctacttacctcaagaaaaagacctgaaaatttctgtctatgattatgacacctttacccgggatgaaaaagtaggagaaacaattattgatctggaaaaccgattcctttcccgctttgggtcccactgcggcataccagaggagtactgtgtttctggagtcaatacctggcgagatcaactgagaccaacacagctgcttcaaaatgtcgccagattcaaaggcttcccacaacccatcctttccgaagatgggagtagaatcagatatggaggacgagactacagcttggatgaatttgaagccaacaaaatcctgcaccagcacctcggggcccctgaagagcggcttgctcttcacatcctcaggactcaggggctggtccctgagcacgtggaaacaaggactttgcacagcaccttccagcccaacatttcccagggaaaacttcagatgtgggtggatgttttccccaagagtttggggccaccaggccctcctttcaacatcacaccccggaaagccaagaaatactacctgcgtgtgatcatctggaacaccaaggacgttatcttggacgagaaaagcatcacaggagaggaaatgagtgacatctacgtcaaaggctggattcctggcaatgaagaaaacaaacagaaaacagatgtccattacagatctttggatggtgaagggaattttaactggcgatttgttttcccgtttgactaccttccagccgaacaactctgtatcgttgcgaaaaaagagcatttctggagtattgaccaaacggaatttcgaatcccacccaggctgatcattcagatatgggacaatgacaagttttctctggatgactacttgggtttcctagaacttgacttgcgtcacacgatcattcctgcaaaatcaccagagaaatgcagattggacatgattccggacctcaaagccatgaacccccttaaagccaagacagcctccctctttgagcagaagtccatgaaaggatggtggccatgctacgcagagaaagatggcgcccgcgtaatggctgggaaagtggagatgacattggaaatcctcaacgagaaggaggccgacgagaggccagccgggaaggggcgggacgaacccaacatgaaccccaagctggacttaccaaatcgaccagaaacctccttcctctggttcaccaacccatgcaagaccatgaagttcatcgtgtggcgccgctttaagtgggtcatcatcggcttgctgttcctgcttatcctgctgctcttcgtggccgtgctcctctactctttgccgaactatttgtcaatgaagattgtaaagccaaatgtgtaacaaaggcaaaggcttcatttcaagagtcatccagcaatgagagaatcctgcctctgtagaccaacatccagtgtgattttgtgtctgagaccacaccccagtagcaggttacgccatgtcaccgagccccattgattcccagagggtcttagtcctggaaagtcaggccaacaagcaacgtttgcatcatgttatctcttaagtattaaaagttttattttctaaagtttaaatcatgtttttcaaaatatttttcaaggtggctggttccatttaaaaatcatctttttatatgtgtcttcggttctagacttcagcttttggaaattgctaaatagaattcaaaaatctctgcatcctgaggtgatatacttcatatttgtaatcaactgaaagagctgtgcattataaaatcagttagaatagttagaacaattcttatttatgcccacaaccattgctatattttgtatggatgtcataaaagtctatttaacctctgtaatgaaactaaataaaaatgtttcacctttaaaaaaaaaaaaaaaaaa

SEQ ID NO: 1885 - DNA, 3430 bp, HOMO SAPIENS
agacgtttcccgccggcgggagctgtggctgtgattgagagaggggttagaggcgggtcccagcgctgccgcaccatggcggaccagctttatctggaaaatatagacgagttcgtcacggaccaaaacaagatcgtgacatacaaatggctgagctatacactaggggttcatgttaaccaggccaaacagatgctgtatgattatgttgaaaggaaacgaaaagaaaattcaggagcccaactgcatgttacctacttggtgtctggcagtctcattcagaatggacattcctgccacaaggttgcagtagtgagagaagataaattggaagcagtgaagtccaagctagctgtgactgccagcatccatgtgtacagcatccagaaagccatgctaaaggacagtgggcctctgttcaatactgactatgacatccttaaaagcaacttgcagaactgcagcaaatttagtgctatacaatgtgcagctgccgtccctagagctcctgctgaatcctcttcgtcttccaaaaagtttgagcagtcacatcttcacatgtcaagtgagacacaagccaacaatgagctgaccaccaatggtcatggcccacctgcatccaagcaggtttcccagcagcccaaaggaattatgggaatgtttgcctccaaagctgctgctaaaacccaagaaaccaacaaggaaacgaaaacagaggctaaagaagtaacaaatgcatctgcagcaggcaacaaggcaccagggaaagggaatatgatgagcaacttttttggaaaagctgctatgaataaatttaaagtcaatttggactcagaacaagcagtgaaagaagaaaaaatagtggagcagcctacagtgtctgtcacggaaccaaagctggcaactcctgcaggcctgaaaaaatccagcaaaaaagcagagcctgttaaggtgctgcagaaggaaaaaaaaagggggaagcgagtagcattatctgatgatgagacaaaggaaactgaaaacatgaggaaaaagaggagaagaatcaaacttcctgaatctgatagcagtgaagatgaagtctttccagactctcctggggcttatgaagctgagtcaccatccccacctcctcctccgtctccacctcttgaaccagtgccaaagactgagcctgaacctccttctgtcaagagctcaagtggagaaaacaaaagaaaacgaaaacgcgtactaaaatctaaaacttacctggatggggaaggctgcatagtgactgaaaaagtctacgagagtgaatcctgcacagatagtgaagaggagcttaacatgaagacatcctcagtacacagaccccctgccatgactgtgaaaaaagaacccagagaggaacgaaagggccccaagaaagggactgctgctctgggcaaagccaacagacaggtgtccattactggcttcttccagaggaaataaactgccatctctggtagatcagagacttggagtggtcaagggagaagaccaagaaatgtactcctcacttactatgtaagttcatctagatctccacctcacctgtatcaaaagactgttctttcatcctgtgaggtttatactatttctggtttttaaccaaaaggaaatcatctggaagcaggaggcaaaaagctgttaccttctaatgacatttaaaaagcacagtctttgacctgtccaggagaaggatttactccaaaattatactggaacagttttcagaattctcactgaagccatttagtggctaacccactgtgctccactcaccctatgccctggtccgcatatggcacaggaattattccttcttgttcctctgtattctaagaattcatgtgggtgtttcttatccttacattctgctggatacgtttacccctcttgtcttcctgcagtaccacacttctgtcccctaacctcctgaggctgttctctgtaagtcttttaagttttggttggactaaaggctgaagtgaaaatctccctgtaatcctcttcctccattatgcagtacacggacacctggctacagaccaggacgtggcttgtgttctgttcctttcacaaaagctctctgggaccttcacttgcaattagtggttagggaaaagcctcaggcagaacacaaatagaaatttaatgatgtgttcaactccaccagaaattacctcgagtcagcattgacgatattggaggagctgccgtgctgctgatacggggtgtgctttatgctgctctttgcggtttgttgatcccctcctcccccactctcaatacctagagagtgaaacccgtacaatgagataaagactaaaaagagaaatcccttcctatatacagtgtgctacatttacaaaaaatttctccttaagaaaacagaatattcaaaaacagcacttttccaggaagttagtgaggaagataaggcacacatttatttataaatggatgttgctcctttgtatttttagcttccctatttgcttaaaagtacaggctccctaagagaggatggagagggagagactgaattgttagtaggtctaaacatcaaagaaaacatttttattagttacttatggaaaatcatctattacaatgataaccttcaagtgacttccattatggctggacaggcggtgagctcagtggattgcagtggtgtgctggtgattttgcacagtgagctctgcggaaggggtcaggctcaactgctgatgtgtctcacacgtagcagacaaggggtgtctgactggcttcttttgcctcaagatggtgtatgtcgtaagtgatgcaatcagctgtctgctttttaaggttgggattgtgctgactttgggattaacatgagcttctttagcaaccaagcatgaacttgattaagaccagaagtttgggagatgagtcctggcattatgtctaggactaaagcagtggctttgtatagcaagctgagtaaaggttgacatattccaaaacccttctttttaaaatgaaaaaggatggagagaaggatggaaagcctggacttaaacctttagaaaaaacttctggagagaaatcccttttaaacagttacttttgtcattgcctctggtcatttgtctaaataggaatggaaaattaaaagaaaagcaacaatccaatcttttttctaaaaattatgctggggtctcgactaaaactgaatttgaattggaaaattctggtgttggttggagttccatcttgcaagggataatacaaatcctatgatctctatgcccaatatgctgcctcaactctgagctgtctgcaaggcttagtaagtattgagtggtgttttttttttctttttatacaataccatgttaaccacatgagttaaataaatttgagaagttgtttt

SEQ ID NO: 1886 - DNA, 3082 bp, HOMO SAPIENS
cccagaccagcagaggcagcagccggagcagccgcagcctgcgccctctcccgcccgcccgccctccgcccgcccgcccgccctccgccgccctccacccgccccggggtctctttcccccttcctcctcctcctcctccacccccccttcctcctccgcccgcccgcggggcccccctcgccttcccgcccgcccctattgttccgcccccggcctcccgcccttccccttcccgcccgctccccttttcccctcagtcgcctcgcgcctgcagtttttggctttcacccccaaccagtgaccaaagacttgaccactcaaagtccagctccccagaacactgctcgacatggacaccggtgtgattgaaggtggattaaatgtcactctcaccatccggctacttatgcatggaaaggaagttggcagtatcatcggaaagaaaggagaatcagttaagaagatgcgcgaggagagtggtgcacgtatcaacatctcagaagggaattgtcctgagagaattatcactttggctggacccactaatgccatcttcaaagcctttgctatgatcattgacaaactggaagaggacataagcagctctatgaccaatagcacagctgccagtagacccccggtcaccctgaggctggtggtccctgctagtcagtgtggctctctcattggaaaaggtggatgcaagatcaaggaaatacgagagagtacaggggctcaggtccaggtggcaggggatatgctacccaactcaactgagcgggccatcactattgctggcattccacaatccatcattgagtgtgtcaaacagatctgcgtggtcatgttggagtcccccccgaagggcgtgaccatcccgtaccggcccaagccgtccagctctccggtcatctttgcaggtggtcaggcctataccattcaaggacagtatgccattccacagccagatttgaccaagctgcaccagttggcaatgcaacagtctcattttcccatgacgcatggcaacaccggattcagtggcattgaatccagctctccagaggtgaaaggctattgggcaggtttggatgcatctgctcagactacttctcatgaactcaccattccaaacgatttgattggctgcataatcgggcgtcaaggcgccaaaatcaatgagatccgtcagatgtctggggcgcagatcaaaattgcgaacccagtggaaggatctactgataggcaggttaccatcactggatctgctgccagcattagcctggctcaatatctaatcaatgtcaggctttcctcggagacgggtggcatggggagcagctagaacaatgcagattcatccataatccctttctgctgttcaccaccacccatgatccatctgtgtagtttctgaacagtcagcgattccaggttttaaatagtttgtaaattttcagtttctacacactttatcatccactcgtgattttttaattaaagcgttttaattcctttctctgttcagctgttgatgctgagatccatatttagttttataagcttctccctggttttttttttttggctcatgaatttttctgtttgtcatggaaatgtaagagtggaatattaatacatttcagtttagttctgtaatgtcaggaatttttcaaaaaaattaaaagatggactggagctttttctttgtgaatagaaactggatgccacagtgattcatgtgggttttattcctcttgtcttgctgttatttttgtaccttttatccctcaaaggacccttcttgggttttgaatggaagcctttattccggttaagatgttttcttctattttaccacttccatctttttttgtggccctcgatcctatttttccctgactccatgcttggttggcccttataaaacttgtgcccaaaagattgaggattagactttccgaggacttacctgtcctaggggagtaggcaagcacttccactagggagggggtgggggaaaggaatgacacatgacatacatggcatacacattaagcagttgatcatatgtctgactgggttccagtttcttgggaatgttggtccccttgttcaggcttgcatattttaaactaaaaatttcagtctattgtttttagtaacttcatttatagtcctccataacaagttagaaggatgtatctgctaccatttattcctataattttagaaagttggggcttgacattatactcatttagtgagagtagatgcaaaaaagtggaggggcaggagaacttctccagacacctcagataaagtccggagcccaaggctttatcttaaccatgtatggtaccccattcattcatcaagaaaaccctcaacagctgggcctgcatggagtgttatatttcaaggtttttcacaggggttacagtaggacagtccccaccccaatcaggcaccaggataaaagcagggacttaaacagcaccccggttcttcagcctgagccatcacatgctatcagtctcctaacctccccctgggccttaagacagggcttgggcagagaagataaatggtgggacaaaaaaatgagttacattgccacctgagaaacctcagaggggaggacccagccttagcctccctcctcccaagtgcaaaatgtgtaaacagagtaaacggaacagaaaagtgcagtctaagtggttttctctcctgcccctcccaccgcccctccccccaccccctattatttggggataaagaatataaagacaaccctggcttttctattgccttgttgcttgctgaatataaggaatggggtggggcaggaaggggcttgcccttagccacagctctacggctgtgcctcattcatttccacagctgccagtgtccctagagtttatcaggtgaattggtcaggggatcagtctccctcgagcctgacttacggctgggacagccccatctttctgttgattatgtggcgcatatatatatatatatgtatatatatataatttatataaatatttctctatgtaaaaaaaaaaaaaaaaa

SEQ ID NO: 1887 - DNA, 234 bp, HOMO SAPIENS
gaaaaaggatatgctttcctgttcttccaatttccaaatgatatttaggtaagtccaaaagaagagaacattctttctacatctggtaaagacatgactgctgttaaacacagattgccagtgctctgagatgaatccagatgttgaagagagccccagtttgctattatgactttaaaacataagcaaatgtctgttttttttcagatgattgtcgtcttagcagtgaaattt

SEQ ID NO: 1888 - DNA, 2223 bp, HOMO SAPIENS
acttcttttcttggctaagccgcgtttgtactgtgtcttaccatgcctgaaccggcaaaatccgctccggcccctaaaaagggctccaagaaagccgtcaccaaagcccagaagaaagacggcaagaagcgcaagcgcagccgcaaagagagctactccatctacgtgtacaaggtgctgaagcaggtccaccccgacaccggcatctcgtccaaggccatgggcatcatgaactccttcgtcaacgacatcttcgagcgcatcgcgggagaggcttcccgcctggcgcactacaacaagcgctccaccatcacatcccgcgagatccagacggccgtgcgcctgctgctgcccggcgagctggccaagcacgccgtgtccgagggcaccaaggcggtcaccaagtacaccagctccaagtgagtccctgccgggacctggcgctcgctcgctcgagtcgccggctgcttgactccaaaggctcttttcagagccacccacctaatcactagaaaagagcttgttcacttattcccttagtttcttttcataaagtaagttattttagtgtgaaggtcatgggaaatggcatacgtagctttttaactatttggaactcgaggtccccagtgcgtcattggatttgcttttgaatctagagcgtgtctttactcattgtgctgcttagccttcccaggagtcggttctcaattaggctgttgggaatccgcctctttacccgcccccactcccgccccacacgcgccctggtggctccttgggtctgtttcattctaaaacgaagtggctgagttcggctgtcatttaagagaactccaggacacaattcagcccgggttccgcaaacactgcgtgacagctctgtatgactgacgcttggcagcagcttttgtgtccggtcaccagttctgccgtgcgatggggcctcctgtggataccagccgttctgtgtattttggacgaaggccgcgcagccgggtcccagccttgtcctgattgggcgacaagaatattcaaaattctgcgcctttttctaatttgtagatttcagtttccgtcgttcactttgagactttgaaattcctatttctcattttgttgataatttctgcatttaatggtctgtgctttaaatggtaacgctacggccccaggtcactgcgaggcacttaccatgtagatacgggctcaaaagtcacctctcagagacctacgtcatccactcaggaattcgcgcctctcatacttgcctgtctcattttatcttccttctagcagctgtctgaaattggttcgtctgttttcttgtttatggtattctcaagcccttgacagaccggctagtgtggttttcccgtgcatcttcagcctggcacattatggacacttaaatactacgtattgatctaatattgttgggttaatttttccatcccacccttttcttaatcgcttccgtggatggatgaagggtgctgttcatttccattagatgtatgtgaaggcacagtgaaaatggaaatgttcttggagctacttcctcaaaatgtatccttagtcacctcagtgcaacagctgggagggggccgtgttaagattttttttgctacaaagaggaggtggcaatggtagatccacccttatgcttctcagtttagcataacctcttatggattttcatcaaattcagcgtgttggtcactggaaagagccttttccttctccttttcttactctcccctcatggtgttcccctcttaaaggagaggagcttttaatttacacttaccacctcatttgcttttctggaggccatgcaatataggcgggactacagagttaatctcctttttacaaatgaggccaagagaagcctcattggttcacagtcatgcagctcatactgtccacccttgtattctcagatgcaggacaattgcattttagttttattttgtggaggtgcagaatatttactctttctgtccaacccttgattctgccgaggaagacactgatggtttgatgagtgattcagctgtttttggctaagggcttttggagctgatggcaggggtttgatgaatccaaatgagctctagacattatcacagactgaatagatcttaactgtctcctacatgtgtgttttcaaatgtgtatagatgctattgttattaataaagttaccaattaatttaa

SEQ ID NO: 1889 - DNA, 6652 bp, HOMO SAPIENS
actctacggtggccgagaggatgccgcagatgtgttagcggcgagtccagaagcagccccaggaggtgctgggggcatcgtttctctaatctggcctcccgagtgccaaggaggcgtcccggcagcggtcatcatggtgaaggagcagttccgggagacggatgtggccaagaaaataagccacatctgttttggaatgaagtcacctgaggagatgcgccagcaggcgcacatccaagttgtgagtaagaacctgtacagccaggacaaccaacatgcccccttgctatatggggtgctcgaccataggatgggtacgagtgagaaggatcgtccatgtgaaacctgtgggaaaaacttggctgactgtctaggccactatgggtatatcgacctggagttgccgtgttttcatgtagggtacttcagagcagtcataggcatcttacagatgatctgcaaaacctgctgccacatcatgctgtcccaagaggagaagaagcagtttctggactatctaaagaggcccggcctgacctaccttcagaagcgaggactgaaaaagaaaatctctgacaagtgccggaagaaaaacatctgccatcactgtggcgcttttaatggtaccgtaaagaagtgtggactgctgaaaataattcatgagaaatacaagaccaacaaaaaagtggtggatcccattgtatcaaatttccttcagtcttttgaaacagccattgaacataataaagaagtggagcctctgctgggaagggcacaggaaaacttgaatcccttagtagttctgaatttatttaaacgaatcccagctgaagatgttcctctacttctgatgaacccagaagccggaaagccgtctgatttgattctcacacgacttttggtgcctcctttgtgtatcagaccctccgttgtgagtgatttgaagtctggcaccaatgaagatgatctgacaatgaaactgacagaaatcattttcctaaacgatgttattaaaaagcatcggatctcaggagccaagacccagatgatcatggaggactgggatttcctgcagctgcagtgtgccctctacattaacagtgagctctcgggcattcccctcaacatggcacccaagaagtggaccagaggcttcgtccaacgcctgaagggaaaacagggtcgatttagaggaaatctctcaggaaagagagtggatttttctggcagaacagtcatctcgcccgaccccaacctccggattgatgaggtagctgtgccagttcatgtggccaaaattctaacttttcctgagaaggtaaacaaagcaaacatcaatttcttgaggaaactggttcaaaacggccctgaggttcacccaggagcaaacttcattcagcagagacatacgcagatgaaaaggtttttgaaatacggaaatcgagaaaagatggctcaagagctcaagtatggtgacatcgtagagagacacctcatcgatggagatgtggtgctgttcaatcggcagccctcgctgcacaaattgagcattatggctcatctggccagggtcaagccccaccggaccttcagatttaatgagtgtgtctgtacaccctataatgctgactttgatggtgatgaaatgaaccttcatcttcctcaaacagaagaagctaaagcagaggcccttgttctgatggggactaaagcaaatcttgtaaccccgaggaatggggaaccgctgattgctgctattcaggattttctaacaggtgcctatctcctcactctcaaggacactttctttgatcgagccaaggcttgccaaatcattgcttcaatactggttggcaaggatgagaaaattaaagttcgcctcccaccgcctacaatcctaaagcctgtcaccctgtggacgggaaagcagatcttcagtgtcatcctcaggcctagcgatgacaatccagtgagggccaacctgcgaaccaagggcaagcagtactgtggcaaaggggaagatctctgtgccaatgattcctatgttacaatccagaacagtgagttgatgagtggcagcatggacaaaggaaccctagggtcaggatccaagaacaatattttttacattttgctgcgagactggggacagaatgaagctgcagatgccatgtcacggctcgccaggctggctcctgtctacctgtctaaccgtggtttctcaattgggatcggtgatgtcacacctggccaaggactgctgaaggccaagtatgagttgctgaatgccggctacaagaaatgtgatgagtacatcgaagccctgaacacgggcaagctgcagcagcagcctggctgcactgctgaggagaccctggaggcactgatcctgaaggagctgtctgtgatccgtgaccacgctggcagtgcctgcctccgggagctggacaagagcaacagccccctcaccatggctctgtgcggctccaaaggttccttcattaacatatcacagatgattgcctgtgtgggacagcaggccatcagtggctctcgagtgccagacggctttgaaaacaggtccttgcctcattttgaaaaacactcaaagctcccagctgccaaaggctttgtggctaatagcttttattccggtttgacaccaactgagtttttcttccacacaatggccggccgggaaggtctagtcgacacggctgtaaagacagctgaaacgggatacatgcagcgaaggcttgtcaaatctcttgaagatctttgctcccagtatgatctgacagtccgaagctctactggcgatattatccagttcatttatggaggagatggcttagatcctgcagctatggagggaaaagatgaacctttggagtttaaaagggttctggacaacatcaaagcagtcttcccgtgtcccagtgagcctgctctcagcaaaaacgagctgatcctgaccacagagtccatcatgaagaagagtgagttcctctgctgccaggacagcttcctgcaggaaataaaaaaattcattaagggggtctctgagaagatcaagaaaaccagagataaatatggcatcaatgataacggcacaacagagccccgtgtgctgtaccagctggaccgcatcacccccacccaagtagaaaagtttctggagacctgtagggacaagtacatgagggcacagatggagccaggttctgcagtgggtgctctgtgtgcccagagcattggtgagccaggcacccagatgaccctgaagactttccactttgcaggtgtggcctccatgaacatcaccctgggcgtgccccggattaaagagatcatcaacgcttccaaggccatcagcactccaattatcacagcacagctagacaaggatgacgacgcggattatgctcgcctcgtgaaagggagaattgagaaaaccctcttgggagagatttccgagtatattgaagaagtgtttcttcctgatgactgctttattctcgtcaagctctccctggaacggattaggcttctgagactggaagtgaacgctgagacagtgagatattccatctgcacatccaagctccgtgtgaagcccggtgatgtggctgttcatggtgaggctgtggtgtgtgtcacccccagagagaacagcaagagctccatgtactacgtgctgcagttcctgaaagaggatctccccaaggtggtggtgcagggcattccagaggtgtccagagctgtcatccacattgacgagcagagtggaaaggagaagtacaagcttctggtggaaggtgataacctgcgggcagtcatggccacacacggtgtgaagggcacccgaaccacctccaataacacctatgaggtggagaaaactctgggcatcgaggccgcccggacaacgatcatcaatgaaatccagtacaccatggtgaaccacggcatgagcatcgacaggaggcacgtgatgctgctctccgacctcatgacctacaagggtgaagtcctgggcatcactaggtttggcctggccaagatgaaggagagtgtgctgatgctggcctcctttgagaagacggctgaccatctctttgacgctgcctacttcgggcagaaggactctgtgtgtggggtgtctgagtgcatcatcatgggaatcccaatgaacattggaaccgggctcttcaagctgcttcacaaggctgacagggacccgaaccctcccaagaggcccctgatcttcgacacaaatgaattccacatcccccttgtcacatagtccaaagaaagaggggaccatgcctgaccttgactccttgtcctgtctccagctgatgtataaagagttttgtgctccctgggacgggggtcctgaggtccccacctatgccagcaatcagagaagccctcttggcatccccaggagcagcttctcctctgatagggtgcagctcacaccagtgaccctgactgtgccacgctgctcgggagagctgagggttttattgtttgcttgcttgaaacctaatctatagacggccccacagctcgtgcacacactgcttccctggacttaaagcccagccaggtgtcatggtccatcccagctcactgcatacatccatcggctccccatggtgtcttcacacctgacgatgagccaggcctgagccccacacaggccagggcacattcttggattttccattccttggtcatgctggaatctctcaatgtgacatacttatgtaaatattgttactattatttatttgttccatttgagggatttggaatttttgttattttagttttatttttgaaaccaagcatctatagaaaccaagaaagtcagcatgtaagcgtcactggaaaaactggtttaagcaaatagagccgtctgggatttgtaactgaggtgcaactgtcatgaggcccaggcagctctgtaacatcttctatagatgcccctggctaccctgttgttttcatctacctcagacccctatcatggggctctaccctgtgacaagagccaaacccattctccatggcctatggaagcctcactggagtttggggcctgctgcaatggggatgagatggttttttgtagaattatacttacgttccttggatgatctctagttgattttttaagttctgagttgatgctgttaaggtacccggggtagccattggttcttggatctgtgttagaatgagtgctttcccttcctactgatgtgattgtggattaggaattcgtgaccgagtgatttttggccagtggttgggtttaaaattctattaaaatttgtagtttgggctgggtgctgtggctcatacctataatcccagcactttgggaggccgaggggggcagatcacttgagcccaggagttcgagagcagcctgggcaacatgacgaaaccccgtctctacagagaatacaaaaattagccaggcatggtggcccatgcctgtagtacctgctattggtaaggctgaggtggaaggttcacttgagcctgggaggtggaggttgtagtgagccaagatcgtgccactacactccagcctgggcaacaaagcaagaccttgtctcaaaaaaaaaaaagaaaaaaattaagcgtaaaaaaaaattagtttttataaaaaattatagtttgaccttttgatttccctgcatctacaaggtagacctattaacttctcttggggtatcagtgatgtggaaaaaaaatgccatttttcttaatgtttaacccccctttatctttgaattgagctagagcctggtttaggacaaaggattaagtttgttaatgaacactaattcagggcttctacttgagaccccaccgagatcaccagttctcatgtaacctgggaagagccataaaggggtaccccccaccccaactgccttcctggaagcatgcctgggaagtaagctgtaggcctgatccgagccaggaccactgggatccgtgcaaaggccaggggagggtagaattgaatcataggagtgaactccggcacctgttgtcttctgcgggtgacgcacactttaaatggaagagaggttgtggctataacttgtggctgggaataataaagatggcaccgccaaggagcctcaccttgcgtgagtgagtactcagttgggcgctgcagggtctggagtctgtgtgagacgtgtgtgattgtgatgggtgcgaatcagcgtatagcacttgagaacaaggcagaccttggagcagaatggttatgtgaaggatcacatcacccatgggtagggggggaagtcatacgtcctggaggtgctggtcctcctcctggaactgccagccttgctaggactatcaacatcaacagcattgcctggtaaaccctactgtttgtgctccccactgtgtcccatgactggtgttaaaattctccctactttgatcatctgccctgcccaggccttgggctttatgccagcacagagctcaaaggccaggtagcagcacatcctcaagcatgagagctcaaagggttacatttgagtctctgtacctgcttggaagaaataaaaatacgtgtgaattccatctcaaaaaaaaaaaaaaaaaa

SEQ ID NO: 1890 - DNA, 2109 bp, HOMO SAPIENS
gattcggccggagctgccagcggggaggctgcagccgcgggttgttacagctgctggagcagcagcggcccccgctcccgggaaccgttcccgggccgttgatcttcggccccacacgaacagcagagaggggcagcaggatgaatgtgggcacagcgcacagcgaggtgaaccccaacacgcgggtgatgaacagccgtggcatctggctctcctacgtgctggccatcggtctcctccacatcgtgctgctgagcatcccgtttgtgagtgtccctgtcgtctggaccctcaccaacctcattcacaacatgggcatgtatatcttcctgcacacggtgaaggggacaccctttgagaccccggaccagggcaaggcgaggctgctaacccactgggagcagatggattatggggtccagttcacggcctctcggaagttcttgaccatcacacccatcgtgctgtacttcctcaccagcttctacactaagtacgaccagatccattttgtgctcaacaccgtgtccctgatgagcgtgcttatccccaagctgccccagctccacggagtccggatttttggaatcaataagtactgagagtgcagccccttcccctgcccagggtggcaggggaggggtagggtaaaaggcatgtgctgcaacactgaagacagaaagaagaagcctctggacactgccagagatgggggttgagcctctggcctaatttcccccctcgcttcccccagtagccaacttggagtagcttgtagtggggttggggtaggccccctgggctctgaccttttctgaattttttgatctcttccttttgctttttgaatagagactccatggagttggtcatggaatgggctgggctcctgggctgaacatggaccacgcagttgcgacaggaggccaggggaaaaacccctgctcacttgtttgccctcaggcagccaaagcactttaacccctgcatagggagcagagggcggtacggcttctggattgtttcactgtgattcctaggttttttcgatgccatgcagtgtgtgcttttgtgtatggaagcaagtgtgggatgggtctttgcctttctgggtagggagctgtctaatccaagtcccaggcttttggcagcttctctgcaacccaccgtgggtcctggttgggagtggggagggtcaggttggggaaagatggggtagagtgtagatggcttggttccagaggtgagggggccagggctgctgccatcctggcctggtggaggttggggagctgtaggagagctagtgagtcgagacttagaagaatggggccacatagcagcagaggactggtgtaagggagggaggggtagggacagaagctagacccaatctcctttgggatgtgggcagggagggaagcaggcttggagggttaatttacccacagaatgtgatagtaataggggagggaggctgctgtgggtttaactcctgggttggctgttgggtagacaggtggggaaaaggcccgtgagtcattgtaagcacaggtccaacttggccctgactcctgcgggggtatggggaagctgtgacagaaacgatgggtgctgtggtcctctgcaggccctcaccccttaacttcctcatgcagactggcactgggcagggcctctcatgtggcagccacatgtggcgttgtgaggccaccccatgtggggtctgtggtgagagtcctgtaggatccctgctcaagcagcacagaggaaggggcaagacgtggcctgtaggcactgtctcagcctgcagagaagaaagtgaggccgggagcctgagcctgggctggagccttctcccctccccagttggactaggggcagtgttaattttgaaaaggtgtgggtccctgtgtccttttccaggggtccaagggaacaggagaggtcactgggcctgttttctccctcctgaccctgcatctcccaccctgtgtatcatagggaactttcaccttaaaatctttctaagcaaagtgtgaataggatttttactccctttgtacagtattctgaggaacgcaaataaaagggcaacatgtttctgtt

SEQ ID NO: 1891 - DNA, 7528 bp, HOMO SAPIENS; identical to SEQ ID NO: 1124

SEQ ID NO: 1892 - DNA, 1973 bp, HOMO SAPIENS
agccgccgcctcgccgcttcccctcgtcggagcggccgctcgtccgcccggcttgaggcccgcggggagcgcggcgcaattcgtcggcccgcgggggggcggcctcccggcatcttcgcggcgaccaaggactaccaggaaggggagcggctgggatggcgcgtccgcggccccgcgagtacaaagcgggcgacctggtcttcgccaagatgaagggctacccgcactggccggcccggattgatgaactcccagagggcgctgtgaagcctccagcaaacaagtatcctatcttcttttttggcacccatgaaactgcatttctaggtcccaaagacctttttccatataaggagtacaaagacaagtttggaaagtcaaacaaacggaaaggatttaacgaaggattgtgggaaatagaaaataacccaggagtaaagtttactggctaccaggcaattcagcaacagagctcttcagaaactgagggagaaggtggaaatactgcagatgcaagcagtgaggaagaaggtgatagagtagaagaagatggaaaaggcaaaagaaagaatgaaaaagcaggctcaaaacggaaaaagtcatatacttcaaagaaatcctctaaacagtcccggaaatctccaggagatgaagatgacaaagactgcaaagaagaggaaaacaaaagcagctctgagggtggagatgcgggcaacgacacaagaaacacaacttcagacttgcagaaaaccagtgaagggacctaactaccataatgaatgctgcatattaagagaaaccacaagaaggttatatgtttggttgtctaatattcttggatttgatatgaaccaacacatagtccttgttgtcattgacagaaccccagtttgtatgtacattattcatattcctctctgttgtgtttcggggggaaaagacattttagccttttttaaaagttactgatttaatttcatgttatttggttgcatgaagttgcccttaaccactaaggattatcaagatttttgcgcagacttatacatgtctaggatccttttatcaaggcagttatgatcatcgttttcctgccttgaccccaccatcatcaaacactcagttaaatataaattaacattttttagatgaccactcaacataatgcttaagaatggaatttcctctctgtgacagaacccaggaattaattcctaaatacataacgttggtatattgaagacgaaattaaaattgtccttcagttttgaggccatgtgtaaagtttaaccatattgtaaaatatctattccgtattagaaatagctagttgacagcttatacttctcaaaattcatattgttatgtacacaaactaagtttctatatgtgaagttagtgagtctttttgtgttactccaaaataaaggcaatgatttatttttttcccagtgccaatacaattttgagctaagcactcaaggtggatactttacattttaaagctggaatcagcaacagccctatgggaaaccagacaaagcattgacttttaaatgtagacttttaaaataaactgttttcttttggaactacaattagaatagttaatattcatccttaaaccattattatgtgtacattattgttgctattgtgataatagagaattttatttatttttatgccagcttatattgtgagaacacatttagtcagtttgggttttatcaatcctgttaatgcttgtccttggaacatctttcgcgtattcacggtttgtagttgaaaagtttactgtaaaaaaatcaaaaacaaaaaaatgtattgtttttacagaataaatttattgggatgtgtactgggagtaagatttgaggttgtaagcaaactaagttagtgtaatttggcttcatatatgtaacgtgaggtattaatgtaattcatatattaaagcaaaaattgttcgcagc

SEQ ID NO: 1893 - DNA, 5911 bp, HOMO SAPIENS
agccgcgcagacgccgcccaggacgcagccgccgccgccgccgctcctctgccactggctctgcgccccagcccggctctgctgcagcggcagggaggaagagccgccgcagcgcgactcgggagccccgggccacagcctggcctccggagccacccacaggcctccccgggcggcgcccacgctcctaccgcccggacgcgcggatcctccgccggcaccgcagccacctgctcccggcccagaggcgacgacacgatgcgctgcgcgctggcgctctcggcgctgctgctactgttgtcaacgccgccgctgctgccgtcgtcgccgtcgccgtcgccgtcgccctcccagaatgcaacccagactactacggactcatctaacaaaacagcaccgactccagcatccagtgtcaccatcatggctacagatacagcccagcagagcacagtccccacttccaaggccaacgaaatcttggcctcggtcaaggcgaccacccttggtgtatccagtgactcaccggggactacaaccctggctcagcaagtctcaggcccagtcaacactaccgtggctagaggaggcggctcaggcaaccctactaccaccatcgagagccccaagagcacaaaaagtgcagacaccactacagttgcaacctccacagccacagctaaacctaacaccacaagcagccagaatggagcagaagatacaacaaactctggggggaaaagcagccacagtgtgaccacagacctcacatccactaaggcagaacatctgacgacccctcaccctacaagtccacttagcccccgacaacccacttcgacgcatcctgtggccaccccaacaagctcgggacatgaccatcttatgaaaatttcaagcagttcaagcactgtggctatccctggctacaccttcacaagcccggggatgaccaccaccctaccgtcatcggttatctcgcaaagaactcaacagacctccagtcagatgccagccagctctacggccccttcctcccaggagacagtgcagcccacgagcccggcaacggcattgagaacacctaccctgccagagaccatgagctccagccccacagcagcatcaactacccaccgataccccaaaacaccttctcccactgtggctcatgagagtaactgggcaaagtgtgaggatcttgagacacagacacagagtgagaagcagctcgtcctgaacctcacaggaaacaccctctgtgcagggggcgcttcggatgagaaattgatctcactgatatgccgagcagtcaaagccaccttcaacccggcccaagataagtgcggcatacggctggcatctgttccaggaagtcagaccgtggtcgtcaaagaaatcactattcacactaagctccctgccaaggatgtgtacgagcggctgaaggacaaatgggatgaactaaaggaggcaggggtcagtgacatgaagctaggggaccaggggccaccggaggaggccgaggaccgcttcagcatgcccctcatcatcaccatcgtctgcatggcatcattcctgctcctcgtggcggccctctatggctgctgccaccagcgcctctcccagaggaaggaccagcagcggctaacagaggagctgcagacagtggagaatggttaccatgacaacccaacactggaagtgatggagacctcttctgagatgcaggagaagaaggtggtcagcctcaacggggagctgggggacagctggatcgtccctctggacaacctgaccaaggacgacctggatgaggaggaagacacacacctctagtccggtctgccggtggcctccagcagcaccacagagctccagaccaaccaccccaagtgccgtttggatggggaagggaaagactggggagggagagtgaactccgaggggtgtcccctcccaatccccccagggccttaatttttcccttttcaacctgaacaaatcacattctgtccagattcctcttgtaaaataacccactagtgcctgagctcagtgctgctggatgatgagggagatcaagaaaaagccacgtaagggactttatagatgaactagtggaatcccttcattctgcagtgagattgccgagacctgaagagggtaagtgacttgcccaaggtcagagccacttggtgacagagccaggatgagaacaaagattccatttgcaccatgccacactgctgtgttcacatgtgccttccgtccagagcagtcccgggcaggggtgaaactccagcaggtggctgggctggaaaggagggcagggctacatcctggctcggtgggatctgacgacctgaaagtccagctcccaagttttccttctcctaccccagcctcgtgtacccatcttcccaccctctatgttcttacccctccctacactcagtgtttgttcccacttactctgtcctggggcctctgggattagcacaggttattcataaccttgaaccccttgttctggattcggattttctcacatttgcttcgtgagatgggggcttaacccacacaggtctccgtgcgtgaaccaggtctgcttaggggacctgcgtgcaggtgaggagagaaggggacactcgagtccaggctggtatctcagggcagctgatgaggggtcagcaggaacactggcccattgcccctggcactccttgcagaggccacccacgatcttctttgggcttccatttccaccagggactaaaatctgctgtagctagtgagagcagcgtgttccttttgttgttcactgctcagctgatgggagtgattccctgagacccagtatgaaagagcagtggctgcaggagaggccttcccggggccccccatcagcgatgtgtcttcagagacaatccattaaagcagccaggaaggacaggctttcccctgtatatcataggaaactcagggacatttcaagttgctgagagttttgttatagttgttttctaacccagccctccactgccaaaggccaaaagctcagacagttggcagacgtccagttagctcatctcactcactctgattctcctgtgccacaggaaaagagggcctggaaagcgcagtgcatgctgggtgcatgaagggcagcctgggggacagactgttgtgggaacgtcccactgtcctggcctggagctaggccttgctgttcctcttctctgtgagcctagtggggctgctgcggttctcttgcagtttctggtggcatctcaggggaacacaaagctatgtctattccccaatataggacttttatgggctcggcagttagctgccatgtagaaggctcctaagcagtgggcatggtgaggtttcatctgattgagaagggggaatcctgtgtggaatgttgaactttcgccatggtctccatcgttctgggcgtaaattccctgggatcaagtaggaaaatgggcagaactgcttaggggaatgaaattgccatttttcgggtgaaacgccacacctccagggtcttaagagtcaggctccggctgtagtagctctgatgaaataggctatccactcgggatggcttactttttaaaagggtagggggaggggctggggaagatctgtcctgcaccatctgcctaattccttcctcacagtctgtagccatctgatatcctaggggaaaaggaaggccaggggttcacatagggccccagcgagtttcccaggagttagagggatgcgaggctaacaagttccaaaaacatctgccccgatgctctagtgtttggaggtgggcaggatggagaacagtgcctgtttgggggaaaacaggaaatcttgttaggcttgagtgaggtgtttgcttccttcttgcccagcgctgggttctctccacccagtaggttttctgttgtggtcccgtgggagaggccagactggattattcctcctttgctgatcctgggtcacacttcaccagccagggcttttgacggagacagcaaataggcctctgcaaatcaatcaaaggctgcaaccctatggcctcttggagacagatgatgactggcaaggactagagagcaggagtgcctggccaggtcggtcctgactctcctgactctccatcgctctgtccaaggagaacccggagaggctctgggctgattcagaggttactgctttatattcgtccaaactgtgttagtctaggcttaggacagcttcagaatctgacaccttgccttgctcttgccaccaggacacctatgtcaacaggccaaacagccatgcatctataaaggtcatcatcttctgccacctttactgggttctaaatgctctctgataattcagagagcattgggtctgggaagaggtaagaggaacactagaagctcagcatgacttaaacaggttgtagcaaagacagtttatcatcagctctttcagtggtaaactgtggtttccccaagctgcacaggaggccagaaaccacaagtatgatgactaggaagcctactgtcatgagagtggggagacaggcagcaaagcttatgaaggaggtacagaatattctttgcgttgtaagacagaatacgggtttaatctagtctaggcaccagatttttttcccgcttgataaggaaagctagcagaaagtttatttaaaccacttcttgagctttatcttttttgacaatatactggagaaactttgaagaacaagttcaaactgatacatatacacatatttttttgataatgtaaatacagtgaccatgttaacctaccctgcactgctttaagtgaacatactttgaaaaagcattatgttagctgagtgatggccaagttttttctctggacaggaatgtaaatgtcttactggaaatgacaagtttttgcttgatttttttttttaaacaaaaaatgaaatataacaagacaaacttatgataaagtatttgtcttgtagatcaggtgttttgttttgtttttttaattttaaaatgcaaccctgccccctccccagcaaagtcacagctccatttcagtaaaggttggagtcaatatgctctggttggcaggcaaccctgtagtcatggagaaaggtatttcaagatctagtccaatctttttctagagaaaaagataatctgaagctcacaaagatgaagtgacttcctcaaaatcacatggttcaggacagaaacaagattaaaacctggatccacagactgtgcgcctcagaaggaataatcggtaaattaagaattgctactcgaaggtgccagaatgacacaaaggacagaattcctttcccagttgttaccctagcaaggctagggagggcatgaacacaaacataagaactggtcttctacactttctctgaatcatttaggtttaagatgtaagtgaacaattctttctttctgccaagaaacaaagttttggatgagcttttatatatggaacttactccaacaggactgagggaccaaggaaacatgatgggggaggcagagagggcaagagtaaaactgtagcatagcttttgtcacggtcactagctgatccctcaggtctgctgcaaacacagcatggaggacacagatgactctttggtgttggtctttttgtctgcagtgaatgttcaacagtttgcccaggaactgggggatcatatatgtcttagtggacaggggtctgaagtacactggaatttactgagaaacttgtttgtaaaaactatagttaataattattgcattttcttacaaaaatatattttggaaaattgtatactgtcaattaaagtgtttttgtgtaaactggttcaaaaaaaaaaaaaaaaaaaaaaaaa

SEQ ID NO: 1894 - DNA, 2320 bp, HOMO SAPIENS; identical to SEQ ID NO: 1352

SEQ ID NO: 1895 - DNA, 1891 bp, HOMO SAPIENS
ggcgggaccgacggtgtgtgcggaacatggcggagcgcggcaggaagcggccgtgcggcccgggtgaacacggccaaaggattgagtggcgaaaatggaagcaacagaagaaagaggagaaaaaaaaatggaaggatctcaagctgatgaaaaaactggagcggcagcgggcacaggaggaacaggcaaagcgcctggaagaggaggaggcagcggcagagaaggaggaccgcgggcggccctacacactgagcgtagccctgccgggctccatcctggacaatgctcagtcgccggagcttcgcacctacttggccggtcagattgccagagcctgtgccatcttctgtgtggatgagatcgtggtgtttgatgaggagggccaggatgccaagactgtggagggggaattcacaggagttgggaagaaggggcaggcgtgcgtacagctggcccggatcctgcagtacctggagtgtccacagtacctgaggaaggcgttcttccccaagcaccaggatctacagtttgcagggctcctgaaccccctggacagcccccaccacatgcgtcaggatgaggaatccgagttccgagagggcatcgtggtggatcggcccacccggccaggccacggctcctttgtcaactgtggcatgaaaaaggaggtgaagattgacaagaacctggagcccgggcttcgggtgactgtgcgactgaaccagcagcagcacccagactgcaagacctaccatggcaaagtggtatcatcgcaggaccctcgcaccaaagctggtctctactggggctacaccgtccgactggcttcctgcctcagtgctgtgtttgctgaggcccccttccaagatgggtatgacctgaccatcgggacgtcagagcgcggctcagatgtggcctctgcccagcttcccaacttcaggcatgctcttgtggtgttcgggggcctccagggtctggaagctggagcggatgctgaccccaacctggaggtggctgaacccagtgtcctctttgacctgtacgtcaatacctgtcctggccagggtagccgtaccatccgcacggaggaagccatcctcatctccctggccgccctgcagcctggcctcatccaggcgggtgcccggcacacctgaaagttctaaggggccgaggacatcagtgaagcagcagtgaaaccaggggctctgcaggtcacttgggacggacgccaccagacttgtctccaaaaatcaccacctttaatactccccggcctgcacacacccacagtctcactgggctccaccctcacttactgcccgccgtgatggccttgaggctgcctgcccgcgccaggatgtttggcacaaagagcagccccgaagcccgctcaatgctctcgatgggcaccaggaagcgctccagtgggatggcctcatccacaggtgcgttgggcatcacgtaggtgcggagctcaatttgcccacctgctgcctccaggatcagcaccttgaagaagtgtgtgggcactgccacgtggttcttgccgatgacctggtactttacgtaggatttcccatcagcctctgtcctgtgggcagacccaggcacacgtgggcagggggcctggatgaacccaaagccacctcttccaggcagccttccctgatctgtcctctaacttctgtcaacctgcaggaccacgccctcactgtgagacttctgtagcctgcctggctcctccttgaggctggaactctctccagggtggttaactctttccctctgttttccttatgcccaacactgggtcaggcagagtgggcgacaataaacgctgctaggagaatcgaaaaaaaaaaaaaaaaaaaaaaaaaaaaaaaaaaaa

SEQ ID NO: 1896 - DNA, 786 bp, HOMO SAPIENS
acttccgggcgcggcgccggcttgctgccactgcagagccccgccatggaagacacgccgttggtgatatcgaagcagaagacggaggtggtgtgcggggtccccacccaggtggtgtgtacggccttcagcagtcacatcctggtggtggtgacccagtttgggaagatgggcaccctggtctccctggagcccagcagcgtggccagtgacgtcagcaagcctgtgctcaccacaaaagtccttctggggcaggatgagcctctcatccatgtctttgcaaagaacctggtagcgtttgtgtctcaagaagctggaaacagagcagtcctcctcgccgtggccgtgaaggacaaaagcatggaggggctgaaggcgctgagggaggtgatccgggtgtgccaggtgtggtgacctggaggcagccgccccgcgctgctcagcaggacacgtgaacacccagacacccactcagggactcaagtctcacctccctccccggtggagggaggaactttggcactagcccttggagccaggaaaaaagactcgtgtctcaggcagactcttactctggttactaagatcatctgtgcatgacggggagggtggaacaggtcccggaggagtcgtgaatggttctcaccaggacctgaatcgttgcttgtgtttgagaattggaggaatgagtcagcaggcgtggctcatggcccccccgtgtgcaggatcaattgtaggaggaaatttcttttttattaaaagcgaatgtgtatcccaaaaaaaaaa

SEQ ID NO: 1897 - DNA, 2252 bp, HOMO SAPIENS
gcaagccgaaggcaagcacgatggcgctcaccagccggcccacccgcgccccgtgccgcccggagccccagcgggcgccccgcagccgtgccagcgtcacgctgtagcagccgagcatcagcccgaaaggaagcacgaaagcggtcagagtctccaggctcaggtgggcggcggcgtggaccggcgacgggtggcacagctggcatacgcggtccctccacaggtggcggtagacggcggccgggacggcgagcaacagggcggccagccagaccgccagcagcaggcggcgggccagggccgggctgcgcagccgaggcgccaggaaggggcgggtgactgcgaggcagcgctgcaggctgagcaggccggtgagcagcacgctggcgtacatgctgagcgcgcacacgtagtacaccgccttgcagcccgcctggcccagcggccaggcctgccgggtcaggaaggccacaaagagcggcgtgagcagcagcaccgcgccgtcggccagcgccaggtgcagcacaagcgtggccgccagcggtcgcccccgtgcaggccgccagcccgccaagctccacaccacgaagccgttgccaggcagccccagcagcgccgccagcagcaggaaggctgtgcctgtggcccgcgaagtcttccagctcagcagtgtctcgttccctgggggacggtagcagaccgacatccttctgggcctacaggacacagaaaaaaagtggggaagctgggggaccctacaaggatccttggcaggaaagcagggattgtgttcatttgagggtttcactgtcagtgagagtctcagcttccatgcaactgtccatcacggctgcaactgaaatcagagctgggacacagcgcaccagaagctaaagtcttgatgccatcaaaggacatccctgccccattcacatctctgtcacgtccactaatcggcaaaaggagaaaagtgagagaagatgacctaagtgtgactgcagcaggcagctctggaaaatgaagccagagcagtgagccagcccctcctccgaccaaggaggaaggaaagagcagccccagcacaggagagaaccacccagcccagaagttccagggaaggaactctccggtccaccatggagtacctctcagctctgaaccccagtgacttactcaggtcagtatctaatataagctcggagtttggacggagggtctggacctcagctccaccaccccagcgacctttccgtgtctgtgatcacaagcggaccatccggaaaggcctgacagctgccacccgccaggagctgctagccaaagcattggagaccctactgctgaatggagtgctaaccctggtgctagaggaggatggaactgcagtggacagtgaggacttcttccagctgctggaggatgacacgtgcctgatggtgttgcagtctggtcagagctggagccctacaaggagtggagtgctgtcatatggcctgggacgggagaggcccaagcacagcaaggacatcgcccgattcacctttgacgtgtacaagcaaaaccctcgagacctctttggcagcctgaatgtcaaagccacattctacgggctctactctatgagttgtgactttcaaggacttggcccaaagaaagtactcagggagctccttcgttggacctccacactgctgcaaggcctgggccatatgttgctgggaatttcctccacccttcgtcatgcagtggagggggctgagcagtggcagcagaagggccgcctccattcctactaaggggctctgagcttctgcccccagaatcattccaaccgacccactgcaaagactatgacagcatcaaatttcaggacctgcagacagtacaggctagataacccacccaatttccccactgtcctctgatcccctcgtgacagaacctttcagcataacgcctcacatcccaagtctatacccttacctgaagaatgctgttctttcctagccacctttctggcctcccacttgccctgaaaggccaagatcaagatgtcccccaggcatcttgatcccagcctgactgctgctacatctaatcccctaccaatgcctcctgtccctaaactccccagcatactgatgacagccctctctgactttaccttgagatctgtcttcatacccttcccctcaaactaacaaaaacatttccaataaaaatatcaaatatttaccactaaaaaaaaaaaa

SEQ ID NO: 1898 - DNA, 3785 bp, HOMO SAPIENS
acagaaggaagagcgcgaaattgcccaggatggacactttcaaaggggccccagcggctaagtgactctcagggaaggtggccttgccatcccaacttctatttaggggcaaccactagcaagttcttctcttcgggcaattggaaagagttcctataagcaaagtggaggtgatgtggacccctggaaaatttccttgccccgtttgaactttgcaatgattcactgcaagtcatgtccacgtggaaagcaagactcaccaaaagactgaagtctccctctagaagcatgcatccatttccgtgctcagctctgctcgcctgttttgggaatacgagggagagtgcttccttcaatcagtccggcgtggctgatactcattccaccgtccgtgtgcagcctgtggccaaagcaggcagacagccaagacacccaagcgcagaaggagctccagagaaaaggcaagattcgagcacccatgcagagagaaatggcagtgcgaatcggaattcaagtcaccgcactgcggcccagcccgcggagacgcctgaagatgtgcccgggtccctggatgatggggcggactgtgaagcagtggtgtttcacgcttccatccccagaccatcaattattgacacgcccaaggaagaagaatttcgagaagaacctaaatgcctcgagctggagcagaaaatgacatcagacagcccacctgaggatattgaccataaggactcatatctcattacaagaagcatcatggccgagccagactacatagaagatgacaatcctgaactcattaggcctcagaaactgatcaatcctgtaaaaacctcccggaaccatcaagatcttcacagagaacttcttatgaatcaaaaaaggggtcttgctcctcagaacaaaccagaattgcagaaggtgatggaaaaaagaaaacgagaccaagtaataaagcagaaggaagaagaagcacagaagaagaaatctgacttggaaatagagctattaaaacggcagcagaagttggagcagcttgaacttgagaagcagaaattgcaagaagagcaagaaaatgcccccgagtttgtgaaggtgaaaggcaatctcaggagaacaggccaagaagtcgcccaagcccaggagtcctaggctgaggctgcaccaagacctcgtgtgtcaccccacagagctgtctgtgggtgccttctcaatctcagggcaatagcccctggagaatatttcagccagcagagaattttgacttgcagtaggatttggtttgattttcctacgatctgggtggatgccttgcctgtgacagttgcagttcctattcgccaaatgaagggcagtgccccgcacgtaagttggaatgatggacctgtgttcagagacttaacagaaccaacaagcaaaacaagtgagaacaggaaaaaggaagaggacactggaatcaattcttgagagttgcactacttggtttttcttccattccaagtttcgtgggacccagagccttttttcttttaaaagctaaaaaacaagtgtttaattcctctttttgttatctgttagataattgagatcacctagaaatgcgtttaatctgttcactcactgtaaattttgaggacccagaattgtcttgtttaatttatactttcacccctgttgcagttaacaccagagaaggaacgtgaatgtcgagcacagccactacccttgttggcacttaatttagaaatagggtgagaagtttaaaagcccatcttgattttattttcattccttttggttctctgtgtaataatagcaggctacatagtgacattccagttccaagaaggtacatcctgtccattcattaattgctttgattactaggagggtttctgttcagttttgtttttaaatgtcttgctgatctagttctttcagatggaataaccttccagtcccttagagagtggaactagtccatataacccagcttcagtagcaaaagtagaagccgccacatcttttcatttctccaagaggagagtggggaaggttcccatgaccagctgggcagtcaggatttctctaggcattctaatgtgaaataagtgtagactgctgtcaaggaggcttcatcagaagatgtatagcatttgaatgtctaatgataatgcatatcattagaatccaagctttgaaaatttctgattaatgctcatgtatttctttatctttgtttttccttgtgaagaaagactttcaccactgtctgagtgatgatgctgttgataaggatgatgtcgatgactactatattgcatctctcaggaacagctgatgggaagggaggggctgctgagttcccttgttctagctagcagcacgctcctcagagagggggccgagttacagacagcagccgcattctcatgcaaaattagttttaaactgctagtgtgggcatcggtaccttttgcctgggtgataccgaagaattgttgaggatttagtatgctccgtagagacagttcagccagtcatttctgcattggagagacttctcatactttctttgaagactcatagaaagctggatctagagctcttgaatccttaattagcacagtagaaattagctttctatgggaatgctttagtgttagcagttgacaattaggcccatattcaatctgaatgggaacaaaagtaaatgcaatgataatatactgctagttagagaaacatgttagttgattatacctgaaatggattatttatctcatcagcaagtattatttgaataaaatgagaaatgcttaagaaaaattgttgctctacagtaatttggtttcgaagaatggaatggtaactattttttcccatcgttcttttgagagaaggaagtgtgatgactgatgatcttgaaaagcccatttctgattgcacgttgactggaattctttctttgtgtctgtggactagcgatgctgtttgtaaaatgaagattcgggactggctcatatctttttatctaactagatgtcagatcttgaaatctgtattctcgaagcaattctgccacttgatcgtattcacaggggccctggtaggctcctttagaaggaccatttctgttcctagagcttaactagaattcattcttcactgaaaaaaaaaaaagttacttaagaaagcatttctttcctaatctcactcaaatctgcagaattatttgtaattagtaatacaaaatctggccaaaaggagacttgtaaatagcgtaaagtggtgtcttatgctaaacggtggaatgtataggcagagaagctctttgaagttgtcagatgagctgggctcacaagcctgattcaaacaggctgtcggtctcctctcaccccttaatactgtgcagcccaaactcctaggactcttgaacatctgagcagttttgtgctttgagccactttttgacaaaaatggctccatttttccacagcgtggttttcttaaaatagtttaatgttttatagtctcatagtagtagtgttgctttctaagctataacagtcgaccttattcttctactctgaaaaatcttgacttgtttgagtgtatataatatatataaagggagccttaatggattggttttcataatttaatattttttgtatttgctcttgtataattgtttttaacggaaagtattaaagaattgagggtggaattcttagaaccaaagttattcttaataaaaatcaccacatgcttggaccatg

SEQ ID NO: 1899 - DNA, 4488 bp, HOMO SAPIENS
gcagctcgctggctgctcgcgctcgggcaggcgggctgaggaggctgccgcgcccccgccgccgccgccgcgggggaagcctgggagccagatcggcgtcgcctcggcctccgtaacccccgcctagccgggccatggcggaacgcggaggggcgggcggtggtcccggaggcgccgggggcggcagcggccagcggggatccggggtcgcccagtcccctcagcagccgccgccgcagcagcagcagcagcagccgccgcagcagccgacgccccccaagctggcccaggccacctcgtcgtcctcgtccacctcggcggcggctgcctcctcctcgtcctcgtctacctccacctccatggccgtggcggtggcctcgggctccgcgcctcccggtggcccggggccaggccgcacccccgccccggtgcagatgaacctgtacgccacctgggaggtggaccggagctcgtccagctgcgtgcctaggctattcagcttgaccctgaagaaactcgtcatgctaaaagaaatggacaaagatcttaactcagtggtcatcgctgtgaagctgcagggttcaaaaagaattcttcgctccaacgagatcgtccttccagctagtggactggtggaaacagagctccaattaaccttctcccttcagtaccctcatttccttaagcgagatgccaacaagctgcagatcatgctgcaaaggagaaaacgttacaagaatcggaccatcttgggctataagaccttggccgtgggactcatcaacatggcagaggtgatgcagcatcctaatgaaggcgcactggtgcttggcctacacagcaacgtgaaggatgtctctgtgcctgtggcagaaataaagatctactccctgtccagccaacccattgaccatgaaggaatcaaatccaagctttctgatcgttctcctgatattgacaattattctgaggaagaggaagagagtttctcatcagaacaggaaggcagtgatgatccattgcatgggcaggacttgttctacgaagacgaagatctccggaaagtgaagaagacccggaggaaactaacctcaacctctgccatcacaaggcaacctaacatcaaacagaagtttgtggccctcctgaagcggtttaaagtttcagatgaggtgggctttgggctggagcatgtgtcccgcgagcagatccgggaagtggaagaggacttggatgaattgtatgacagtctggagatgtacaaccccagcgacagtggccctgagatggaggagacagaaagcatcctcagcacgccaaagcccaagctcaagcctttctttgaggggatgtcgcagtccagctcccagacggagattggcagcctcaacagcaaaggcagcctcggaaaagacaccaccagccctatggaattggctgctctagaaaaaattaaatctacttggattaaaaaccaagatgacagcttgactgaaacagacactctggaaatcactgaccaggacatgtttggagatgccagcacgagtctggttgtgccggagaaagtcaaaactcccatgaagtccagtaaaacggatctccagggctctgcctcccccagcaaagtggagggggtgcacacaccccggcagaagaggagcacgcccctgaaggagcggcagctctccaagcccctaagtgagaggaccaacagttccgacagcgagcgctccccagatctgggccacagcacgcagattccaagaaaggtggtgtatgaccagctcaatcagatcctggtgtcagatgcagccctcccagaaaatgtcattctggtgaacaccactgactggcagggccagtatgtggctgagctgctccaggaccagcggaagcctgtggtgtgcacctgctccaccgtggaggtccaggccgtgctgtccgccctgctcacccggatccagcgctactgcaactgcaactcttccatgccgaggccagtgaaggtggctgctgtgggaggccagagctacctgagctccatcctcaggttctttgtcaagtccctggccaacaagacctccgactggcttggctacatgcgcttcctcatcatccccctcggttctcaccctgtggccaaatacttggggtcagtcgacagtaaatacagtagttccttcctggattctggttggagagatctgttcagtcgctcggagccaccagtgtcagagcaactggacgtggcagggcgggtgatgcagtacgtcaacggggcagccacgacacaccagcttcccgtggccgaagccatgctgacttgccggcataagttccctgatgaagactcctatcagaagtttattcccttcattggcgtggtgaaggtgggtctggttgaagactctccctccacagcaggcgatggggacgattctcctgtggtcagccttactgtgccctccacatcaccaccctccagctcgggcctgagccgagacgccacggccacccctccctcctccccatctatgagcagcgccctggccatcgtggggagccctaatagcccatatggggacgtgattggcctccaggtggactactggctgggccaccccggggagcggaggagggaaggcgacaagagggacgccagctcgaagaacaccctcaagagtgtcttccgctcagtgcaggtgtcccgcctgccccatagtggggaggcccagctttctggcaccatggccatgactgtggtcaccaaagaaaagaacaagaaagttcccaccatcttcctgagcaagaaaccccgagaaaaggaggtggattctaagagccaggtcattgaaggcatcagccgcctcatctgctcagccaagcagcagcagactatgctgagagtgtccatcgatggggtcgagtggagtgacatcaagttcttccagctggcagcccagtggcccacccatgtcaagcactttccagtgggactcttcagtggcagcaaggccacctgaggccctgtctcccagccactttccctcctggcactgccaccagcctcaccgcctgcgggcagggggaggccagcaggcccgggcccagcaccccttccctggcaccagggtctgcctctcactcgcccaggtcccgaaggacactgccacagggacgccttccctcccctcccctccagcccacccctgcacagcccctcctccttcccgcttttccccttctccctcctgctccaggcccaaggcgtgttggttttgccttctggtgcccatagtcccctggactgagtcccccaggccttccttcacccgacttccaaactcttccttgtggtatcagtttccttctcggaaatgagaaagctggaatcctggtccccagcaggagagcctagtcctcccccagcccctccagccaccagggtgtcctctaggatgcagctgccagatccactcactctgctgcctccagcaggacccaaggccactttcaactcttatggggttctccacctgccccagagcttctcaagggagggtaagggggcaccctgagcccacaggacccctacttcacagctcacaggggcaggaggcagctcccctgcctccaggaccctgttgctatggtgacacagcgtttctaggacagaggggcctcccagtctccccccaccacccgtgcacgacttcctcaccacccccaggttccctgcagatgtcgtgtgtgtcctgagtgtttctttggttctttgcacgccaagtctcttggttgtaccatgtgacacaccctgtgcactggtcgctgtcttcgtggcttccacccttgttaatgatgctcctgcctctgcctcccagcccctcacccagcacagctctgcctggacttggagagatgggaggcagacccccaccaccatacatgctgtctgtggcccctcagacattctgtttcatctcccattcatctccctcctcccaccgtgtcagtttttctgcctttccctgctctgttcttccccctccttaggccccagcctgggcccagacccatcctcccagccaggtttccctccagcaggctccttccctccctgtcacctccctctcaccaacccggggtctgagcccctcattcctgaccgtccgtgttctcaggagtggttgaggacacagggccccagcccagccctctgcaccccccagcccggccatctgcgccccacagcccctttggagcttttctcttgtcctctcactccttcccagaagtttttgcacagaacttcattttgaaagtgtttttctcattctccatacctcccccaagctctcctccagcccttcccagggctcagccctgctgtcctgagcgtctcctgggccagagagaggagatgggggtgggagggactgagttgatgttgggtttttcattcaataaattggtgatttcttaccg

SEQ ID NO: 1900 - DNA, 4575 bp, HOMO SAPIENS
agaccaggtagtcgctgcccagccggtcaggacgtgggacgcaaggggcaatcctgcccggttcgcaggtccgaggcgggcgcggtggcccttcgggccccgccccgccccgccccgccccgccccgcccaccggcagcccggccacgacccaagcggaggccgcgccgacgcctgcgcaatgtatgcggagagccaccaccgcctccggtcccgactccgatgatggcggacggcgccgcagctggcgctggcggcagcccatccttgagagagctgcgggcacggatggttgctgcagcaaacgagattgctaaggaaaggaggaagcaagatgtggttaatcgtgttgcaacccattcctcaaatataagatcgacatttaaaccagtaatcgatggatccatgcttaaaaatgacataaaacaaagattagcaagagagcgcagagaggagaaaaggagacagcaagacgccaataaagaaacacaactacttgaaaaagaaagaaagaccaagctccaatatgaaaaacagatggaggaaagacagagaaagctgaaggagcgaaaagagaaagaagaacaacggagaatagctgcagaagaaaaaagacaccagaaggatgaagcacaaaaggaaaaatttacagccattctttatcgtactttggaacggaggagacttgctgatgattatcagcaaaaaagatggtcatggggaggctctgcaatggcgaattctgagagcaaaactgccaataaacgatctgcatctactgaaaaacttgaacagggtacttctgctttaatcagacaaatgcctttgtcatctgcaggccttcaaaattccgttgccaaaaggaaaacagacaaggagagaagctcatctttaaatagaagagatagtaacctacattcgtctactgataaagaacaagccgaaaggaagccacgtgttacaggcgtcaccaattatgtaatgcagtatgtcactgtacccttgcgtaaatgtactagcgacgaattgagggctgttatgtttcccatgtcgacaatgaaaatacctcctcaaacaaaagtagaagagtctcccttggagaaagtagagacacctcccaaggcaagtgtggatgcacccccccaggtgaatgtggaagtattctgcaacacaagcatggaagcgtcccccaaggcaggtgtgggcatggcccctgaggtgagcacggactcattccctgtggtgagcgtggacgtgtcgcctgtggtgagcacatatgattctgagatgagcatggacgcatcccccgagttgagcatagaagcactcccgaaggtggacctggaaacagttcccaaggtgagcatagtagcatccccggaggcgagcctggaagcacccccggaagtgagtctggaagcactgccagaggtgagcgtggaagcagccccagaggggagcctggaagcacctcccaaggggagcgcagaagtagcccccaaggagagtgtgaaagggtcacccaaggagagcatggaggcatctcctgaggcgatggtgaaagcatcccccaagacatcccttgaagcaagcatggaagcatctcccaaggcaaaagcgagagacgctccaaagaaatcagaaatggacaaacaggccttaatccctattgccaagaagcgtctatcatcatacactgagtgttataaatggtcatcatctcctgaaaatgcttgtggtctgccgtctcccatcagcactaacaggcaaatccaaaagaactgccctccatcaccattaccacttatttcaaaacagtcaccacagacttcttttccttataaaataatgcctattcaacacaccctgtctgtgcaaagtgcatcaagtactgtcaaaaagaaaaaagaaacagtttctaaaaccactaacagatgtgaggctttgagccaaaggcatatgatctatgaagagtctggtaataagagtactgcaggtattatgaatgccgaggcggcaacaaaaattttgacagaattgcgccgccttgctcgtgaacaaagagaaaaagaggaagaagaaagacaacgggaagaaatgcagcaaagggtcattaagaaatcaaaagacatggcaaaggaagcagttggaggccaagcagaagaccacttgaaactcaaagatgggcagcaacaaaatgagactaaaaagaagaaaggatggctggatcaggaagaccaggaagcaccactgcagaaaggggacgccaaaataaaagctcaagaggaagctgacaaacgcaagaaagaacacgagagaattatgttacaaaatttacaagaacggttagaaaggaaaaagagaatagaagaaattatgaagcggacaagaaagacagatgtgaatgcctcaaaggtcacagaaacatccagccatgacatatatgaagaggctgaggctgacaacgaagaaagcgacaaggactcattgaatgaaatgtttccatcagccattctaaatggcacaggctcacctaccaaatttaaaatgccgttcaacaatgccaagaaaatgacacacaagctggtatttctagaagatggtaccagccaggtccgtaaagagccaaaaacatattttaatggcgatttgaaaaacttcagacaaaaaagcatgaaagacacttcaatacaggaagtagtttcaagaccatcttccaaaagaatgaccagtcacacaacgaaaaccagaaaggcggatgaaaccaacaccaccagcagatcctctgcacaaacaaaatctgaaggattccatgacatcttgccaaagtcctcagacacctttagacaataagagaagaagcaaacctgtttctcctcatttggatatgtaaaccttactcagcctgggagatgaatacatcttccactctggataactcaactcctgggcccatcagtcctcaaatttttctgcttctgacttgaacctggtaaaggaagtgacaccgaaaaattgaaagaaactgtcaaaaggccactttgatgtatatctcagatgttaaagtcatcttattctcttgtgtctaagcaagagttctaagtaaagagtggtttttgttttctttggaaaatcatcattgtctctcattcttgtgttgtcccaccaatgtgtttgctggagtgagtgcatcaaggatgctttcctgaaactgtaactgtggagtttctagaagaatctgattgcagaactaattctctttcagtatatatttgaaatcttaaagtaatgctttttctttttctttttcttttttttttttttgagacggagtcttgccctgtcgcccaggctgcagtgcagtggcacaatctcggctcactgcaacctccgcctcctcatctcaagcaattctcctgtctcagcctccccagtagctgggattacaggcatgtgccaccacacctggctaatttttttgtattttagtagagatagggttttaccatgttcaccaggctagtctcgaaatcctggcctcaagagatccacccgtcttggcctcccaaagtgttgggattacaggtgtgagccactgcacccagccaagtaatgctttttctgtgtaccagtgacaattttgacagctaaaaactcacagttgatcttgtagagaacagaatagattatgcaagggccgcaggatcgctcacaagagctgtcagattgtttctaatataaaaataccaaaggttgcaaaatccagcaaattgtattttactgtgatatatgtatatttttaactctacccatctgtgccagtgagtacacaggcactaataacctgaaatgctgggagtcctgtaaagccccatcttggaacagtcagcacctttcatgctcttgtcagtgtttccttttgaaggacatattggtgtttatctacagaaacatatattatttttattgtgtacataaaggagtatatggctgttgtcccgtggggtatgtttaattcctctaaatgtttaaagtacttttctgcctgtactctccagttctgtcgttgagtatacactcaggcttgagatacaaccaaaatttgcttgcctttctctagccactggctgccagtgagttcgtgtgatgggcacacagaaatgcacacagatgtacatacacgtatgtatgcacacacagtatatgattccataaaattcaaatgcagattaattctcctaatgagttttcagtgttgaatcgtaaatagtctgaagcaggccagtgttccttttggctgccagtcttggattagtaaaaggaggtaattctttcagattccctggttctttgccactcagagtattgtacttttgatatagaatagagaaggttacctttggtttaaaaactatttttatatactagctctttcatgtataaaacagagacaatcatcctaacaaaagagttcctgttatttttctgcacaaatgtcttgtgttgaaacactgttacagttccatataaatgtgtgctatataaaataaactttggagataaaaaaaaaaaaaaa

SEQ ID NO: 1901 - DNA, 468 bp, HOMO SAPIENS
accacgcttttcatctgtcccgctgcgtgttttcctcttgatcgggaactcctgcttctccttgcctcgaaatggaccccaactgctcctgctcgcctgttggctcctgtgcctgtgccggctcctgcaaatgcaaagagtgcaaatgcacctcctgcaagaagagctgctgctcctgctgccctgtgggctgtgccaagtgtgcccagggctgcatctgcaaagggacgtcagacaagtgcagctgctgtgcctgatgccaggacagctgtgctctcagatgtaaatagagcaacctatataaacctggattttttttttttttttttttgtacaaccctgacccgtttgctacatctttttttctatgaaatatgtgaatggcaataaattcatctagactaaaaaaaaaaaaaaaaaaaaaaaaaaaaaaaaaaaaaaaaaaaaaaaaaaaaaaaaaaaaaaaaa

SEQ ID NO: 1902 - DNA, 536 bp, HOMO SAPIENS
  misc_feature (30)..(41): n is a, c, g, or t
  misc_feature (43)..(43): n is a, c, g, or t
  misc_feature (313)..(313): n is a, c, g, or t
  misc_feature (499)..(499): n is a, c, g, or t
agggctgatttagtttccaagaaataactnnnnnnnnnnnntntgcgtgtgtctactacttaggaacccaaaacaaaccttcagaccgttttcatgagtactgagaccaagaaaaccactgggcagtgggtggtctggaaatgtaaatgttgatggtactccagtaatgagtcatggaacaatgtttcatattgaaaatgtttttgtaaatgtgggtttcagggtttcaaagtgaacccatatgtgttaggagaaaggacacaccaaagcagtaaaataattgggtcaatataaaaagtagaatattgcccanagagaagatgtggataatttctaatacggatcaaaggcaccaaaaaggtgagctgtgagtaagatattcagacctgcaccgtcccaagcagtagccacagtggcaagtagcctcctcactggacagtgcagctacggaatgatgccatcaccggaaagttccatcagccagcaccgatgcagaccnttgcaactgcccctcacgctggacagcacctgtttga

SEQ ID NO: 1903 - DNA, 1145 bp, HOMO SAPIENS
cttctctggggcggtcgcgttggcagcggatgcgggaagccggactctgggcgtcatgtactacaagtttagtggcttcacgcagaagttggcaggagcatgggcttcggaggcctatagcccgcagggattaaagcctgtggtttccacagaagcaccacctatcatatttgccacaccaactaaactgacctccgattccacagtgtatgattatgctgggaaaaacaaagttccagagctacaaaagtttttccagaaagctgatggtgtgcccgtctacctgaaacgaggcctgcctgaccaaatgctttaccggaccaccatggcgctgactgtgggagggaccatctactgcctgatcgccctctacatggcttcgcagcccaaaaacaaatgagttaggctgcagaggactggtttgttttttggcataaaccctttgaagttcctttttcattgttaaattaaaatttttttttttacttggatggcttaacatttttgcaagaaaaataggaagatatgaagatgatgttttggtttgtttatgaaatgcatatggcttgtcagagctcattcgacagttaaagccattgtttaaagaaatggtgctttgctctgtgtttgtgctcctgatttccctggaggttctggatgaaggctgaacacaggcttgttaatgtcagtctgtgctgaggacctcagggacttgaggttgcatttttgagcatggggtgcaggagcctttctggatttggatgtggctatggaaagaacacagaagccaaggtcatgtgcatgaaatgaggagtttgagttagtcacctcggggattttttccattttgcagtaaaatgttaaattaatgtagcctgcctctatttgttgggcaggtaatttcaaagggttatttgcctcatctcctatctttagtgaaatcttatgtgtaattattccaccgtgggaacagagaatacctgtttagtgttgcactttagactggtgtctgttttgttaatgcagctgtgccacaaattctcctttatcttttaaaaatgttatagctttaaattttgatttattttgactgtggaataaatacatgaatgaaaaaaaaaaaaaaaaaaaaaaaaaaaaaaaaa

SEQ ID NO: 1904 - DNA, 7676 bp, HOMO SAPIENS; identical to SEQ ID NO: 1786

SEQ ID NO: 1905 - DNA, 1655 bp, HOMO SAPIENS; identical to SEQ ID NO: 109

SEQ ID NO: 1906 - DNA, 1742 bp, HOMO SAPIENS
atttctctactcacctgtctccgaatccgtcgtggtgtttcaagcgagtcaagattccagatcgcgccccaggctggactcggaattactgccccgcgggtctgcattttcacagcggcaggtggcttgtggtccctgacaaggaggaccctgagggcaaccacaccttgccatgcagagcacctggcttctcatctgccaagctcactctgacccggctgcaggaagggaaggagccaaccccggactcaagactcaaggggaccagaaccagggagatgagacataccagggctgggcagctgtgggggtccttccagagaggagctgagatacgcctacctggaggggcccctgggcctggaggggctcctcagtgtgactgggtgaagtgttttcagaggaccagggttgaggttgggggcatctcatccagaccctgccggcatctgccccagaacccaagggcccctccttcctccctcctcaatggaaatgctggagatgtcctcagtcaccctctgagcactcacacatcaccccttatttggaaatttttctcactctaaccttccttcctgccgcaccttctgccccatccccaggctctggcctctctctctcctcttctaccctttagcaggtaatgactcagttcccactgaggagccagctgtaggtgagagtttgggctctcggtgaggttgggagaaggaaaaggcttatgggccagggggtgggagggagaatgggcacagccagagcagagtggaagggttgggggaggcgataaagacagatgtttccgtattaccatttttctttcatggtccgagggagctgcccttcccccaagcccaggaaagtgaaaagagaagcaggaacagtaaaatactccacaggaaagaaaaatcttagtgatccctcctgctgtctctttccttttgcctattctggcaaattttgtaagtgaaatttgttaccaagatgtgaaaatcttataagaaagtctctaaatatttgagaataaaattatcaatgtctcagctctgcaggctgaaaaaacggaggctttacaaaataaaatcatgcttggaaaacttctcctctgagggatgtcaaaggctgcactgaataagctctaaggtggtgctgaaatgagtcatttatttgcctgtgtaagctcaggcaggtgttggaattgaggaagtataggtaatgaaaaaagtaaacatgtcctcgggacatagcgactggtgatgaccacacaatcaacacaataaactctagcattcacattgtagtccagctcattcaagcaaagctatctccaatagggagtttaccctgtacagaacacgtgcatttccacctgttctcagactgaccctttgctcatcacaatagtgaaaaaaaacacagccctgggtggagatttaagatgctaatgagtcatgagatgtatgaacaagcatgtacagctactgcacacgtgcacccagaagaccgcccagaacatgcttgctagtaacacctcttcccacccacctcctgtgaataatcatgtaagactcccataaagggagtttctccagcagtgatcaatgctgtctcatccttaggagcagcccaccctgaatcctctcagggtgtacagtttattttgcacttaactttcaaaataatatttttcctttgtaataaattgctttgtacttcaaaaaaaaaaaaaaaaaaaaaaa

SEQ ID NO: 1907 - DNA, 3701 bp, HOMO SAPIENS
aggcgctctgaggggcggaagcggagaggcggggctaggcccgacaggggagcggaagaggcccaggaggctgggtgaggcgctgagacggtttggcggtgagtcctgggccaggcgcagctgaaaggcccgcaacccgggaaacgtcaaaacaaacagaaggacttgggattccggagcagtcgcccctatcgctgctcctgcagttgcggacgccaccgaccccgccgccggaggactgggcactgaaaggcctctaggcctaggcgcggcccgcggagccagacgtgttgctgccgtgagtaaaacgagcgccctctccgcactcgtttacaaattaaaatggaggaaatttcgttggccaacctggatactaacaagctagaggccatcgctcaggagatttacgtagacctgatagaggattcttgtttgggattctgctttgaggtgcaccgggcagtcaagtgtggctacttctacctggagttcgcagagactggtagcgtgaaggattttggcattcagccagtggaagacaaaggagcgtgccgcctcccgctttgctcccttcccggagaacctgggaatgggcctgatcagcagctgcagcgctcacctccggaattccagtagctgcaaaatgagagtctgaaagtggccaggacaataacatagactggtcctgtggcttcgaggagtaagctaagtagaaaaaagtagaaaaatcagacaaaagttttaattcccccttgaagatcctagcatttaaaaacccaaagtggataatttaggaatcctttttttaaagtgtattacctggagcaagctctgaagccctgggcaggaggagctgcacagcctgcgggccatgcagtgcctgttgatctctaaacacaccaggatgtgcgcaagatcctgtagtgcccccagtgcacaggtgagcagttgtgtgcccagcatataaaatttttggttcctcagcctttctgtctgcctgatgtcaagggcttcctggacagtttggacgttacagttcgtcaggccgtgatcagtggcctgcagtgggactgctcctttgatatctgaacctctgttatgggcttctctgagacaagtaaatgtcaggtgcaagatctggatactaacagtttcagtttgggaaatccaagaaaaagaattatcaagtttgatagggaagctctgtagccttgactccagcaagaagaaaaggtcaaaaccacgtgtttcccaaaagtccagactacaatgattcagctgacttgaggacaaggcctagcatttggctgagcagagccctcttccttgccctccaacctggtggcataggcttggcaaatggacaacttggttgtccagacaggttgaggattcggttatgatcccctggggaggtagcagggacctctgcaactatgcatgatttctcaaacttcaagattcatgtctggatgtattatgctgtggatataagtttagtagggcggtcatttcctactctgagttactggttacctagccagtccatgggtgtgacttggtccttaagtcaggtcactatctgcctcccaccctgggggcaggactgaagtatagaagagcatcatggctgtgcaggaggctgtggtttgaaaactgagcccagagggcactttcagctgccctcaataatgtgaatggattagtgctaggagccaaggagcaggactggattatctcatctgactgtgtgcagaatcctgttgaatgtccctgttttctttggttgggcagtcagagctctgctatggtgaacatccagactgtcaccactttctgtctgccgctcgaaagggatagtcctttccactcggtcccctttggatcttcttgacaacaggagcagtccttttattgttagaagtcagagaaagacctccagaatctcctgactttagggaatggtataggggaagatgggaagtaagagtcacatatcaaaactaccctccactttattccctgagcgagggtttatgaagtataaaggggtgggagccccgaggtgagcgggaacggtgctgctttatttgaaatgttttcttacctcattctgtgccccagtagggggtccagcctcatctgtctggcttggccctgtgttcctcctgtcccctgctccactgcctatctggtgccccaggtgctgcttgccactccagctgtcacattgaacagtttcaattcagctcttaatgctcctgcttccgaagcctgcccaatttcttttttcttggcctctgttttttttttttctttctttttcccttgtttttgtagaagactcagaggagaatctttcttatggctccctctgttgagattggaattggaagagaacttaattttttgtatttaaaatgcagtgtcatgcctataagcatttctcctatataggactgctttgctagtgtgccctcttgctgtgtcttacttcataaggagttgtatcttcccacctccatttcaatactgccggttaggacctaagtagaagagcagtaaaggctgattgacacacagggggatggagttggtccttgtccattctctcacccttgctgtgcatgtatcaatccttatcccagaaggtactatttagactgtatagactgatttagattacatactttagaggattaaggaaaccatagagtttgggccttggaactgttactgccttgtcctagagttgtcctgatcaggcttggggcctagttacagattagtcttaaagaattgcattaacttaaaaaaaatcaaaccttggcaagagctaaaataatttggagatatctttgcccttgacttgtagacgacatctaagaggatgaagaaaggagagtctaagtgagactctggcctacttcctaacaatgtcttggaagtgggatgatggtaaaggagaaaggccacagtccaatccctctgccttcagatagggaactcaaatcctgaaattactgttttctttctggccttttctcctggttagaggaggaagcggaaagtagttttgagtaatactttgttcatattaccccccttttgttttttgtttctggcccctctaccaatagggcagtagcctcctgccctggatgggtataaggtgggcttggtccaacaggtgcccagagggtacatactcctttctggggagagaatgctccctaccatatagttgacagtggttaggaactctccctttccctacctaccttccttttaatagcagaattcctatttttcccttgattatgtgtattgatcaccctgcaatcctattatgtatctgagtgtgtgtgtgtgtgtatgtgtgtgttatgggggaaggggggggttctttaaaatttctgtggtttgtggctttttcttccatacattagttcccaccatcgcatgcccagggaccactgcctggcattatcgcatgctgggatcatcgggggagggtagtgaagctcaccactgtcctttgttttggagatttttatttttgcataagtagtccatcctatacagatagctgattaactgtattcccctttcccctatggctgctggtgtaaataaactgcatctccccattggtaaacagtaataaaattttaaaaaatgaaaaaaaaaaaaaaaaaaaa

SEQ ID NO: 1908 - DNA, 1518 bp, HOMO SAPIENS; identical to SEQ ID NO: 639

SEQ ID NO: 1909 - DNA, 3338 bp, HOMO SAPIENS
caaccaccaaacagacaagcccttcggcctgtcctggagggcgttgaatggcatggcctggagctcaaccaggagaaccgtgctcaggaggaagagaccagaaggataactcaaaaagttctgagaagttcctaagaccacctgaagagaaggagcctgctgccaatggtgtggacaccgcagtgtgcttgaggagacttcagaaacgagaactggaaaaatccctctgctttctctggccagtttcacacaatcatcaggtgagccgaggatccattggaggaaggcattatctgtatccagaggaaatagccaaggatattcagaggtgtgcctgggaagtttgagctgcagcagtggaaccttaatgcccaggatgatcctgtctaacaccacagcggtgacgccctttctgaccaagctgtggcaggagacagttcagcagggtggcaacatgtcgggcctggcccgcaggtccccccgcagcagtgacggcaagctggaggccctctacgtcctcatggtactgggattcttcggcttcttcaccctgggcatcatgctgagctacatccgctccaagaagctggagcactcgaacgacccattcaacgtctacatcgagtccgatgcctggcaagagaaggacaaggcctatgtccaggcccgggtcctggagagctacaggtcgtgctatgtcgttgaaaaccatctggccatagaacaacccaacacacaccttcctgagacgaagccttccccatgaaccccaccactggctaaaactggacacatcctgcctggcaacctgattttctaatcacattcctctcatactctttattgtgatggataccactggatttctttttggctgttgtaaggggtgaggggtggattaatgacactgtttcactgtttctctaaaatcacgttcttttgtgatagactgtcagtggttcccccatatctgtccctgccttgctaaatttagcagaatccctgaggacatggcctctgagaatagcagctgcatttcccagactcccttgcagctagcaaggttgtgtgactaagccctggccagtaggcatggaagtgaagactgtaatgtccaagtaatccttggaaagaaaagaacgtgcccttaactaactttgtcctgcttcccagtggctggatgtggaggaggtggagagcagttatgagactgggaaagaacggggcactcaaagagccacacacatctgggcctgggcgacgtggatcctccttaccacccaccaggccagatttacaggagagagaaatccactccactcttccttaagccactgttattctgatctctgttaaggtcgcagaatcaatgcccttactgatacacctaccttataggactgaacctaaaggcatgacatttccatacttgtcacaagcacacactgattctgcccttgtcacttctgtgctcactcttgtggctctatcctcctcctgcccttccgccttccactcctcccttgcacccatcctgcacacatctccctgaaaacacacaggcacatacactcatatacatagacacacatacacacctcaatctagaaagaacttgctttgtacagggctgagatggaggagaaaaaaatgcccccttcagaatgcataccaaggggaaggtgctcggtcactgtgggagcagggaaaggtgcccccactccccgagagccaggggaaggagtggctctgggcagagagggacacatagcactggggtggcaggtccttttgaggtgatgggccggttttgtgagatgaattgtatcccccaaaaagacaggtaccttcaatgtgacctaattgggaaatagagtctttgcagatgatctagttgagatgaggtcattggggtgggccctcacccaatatgactggagtccttatcggaagagggaaattcagacacagatgcatagggaggacaccatgccgtgacagaggcagagggtgcagtgacacagccacaaaccaaggaaggccgaggatggatgcgcatccccatcccaagaagtcgggaagaagccaggaaggctcctctcccacaggtttcagaggaagcacagccctgcttgaattcaaacttttggcctccagaactgtgagtcagtacctgttgttgaagccacccagcttaggatactctggcagcctactgccatacagtattgggatactatagtgagcccatgcagcacctctcacccacccagagatggagctgctctgccttccagcggggcacccggagggctgccccagcagatagagagggcctccgttctgccacctgccttgaaagggtctccagctgccatatgtagcattggagtcctctgcaatgcgacatcctgaaagctcagctgcctgggcattcctgaagagtatggaatatttaaatgaaacatatttttttaaaacctgcgcataagataaaagcagcccgtgtgcatcttgggccatcctcaaatggacagacttggtcttgtgaggttccagtccttgtttcacataataaacactggcatggctcagcccctgagttaccacagtccttgagatgagtggttctttgggttacaaagtcctctgaaagtctagtgagagctgtgatctttgccccacccgaataatgcatatggacaccacaccttgcctgccgtgtccaggattcatgaccagtagcagcccagctatgcctgccacgtctcatggcccctgtgtaagccagacccttcttaggcagttgcatattcccagactgaggcagggcaggtttgcagagagagacccagagtgcacgtgacccgcagtgtgatccctggcacgcactgactttgatattccaggcacacggactggctatttatcaccacttctttttccccactaagattcctgtgccttttaaggcagagggagatccctatggcgttagtcttcccaggccttaaagggcccttgtcttcactcacaaacctcttatctcttcttctccttcctctacattttaaagggggagagggaaaagtaaccgggagacaaattgagccacatattttcagacacttgttaccatattttaaaatctggcttcacatacacagagtctttgctatgcaccatgtactgttctaagcttcttaaaaatagaatctcaattattattttgcaggcaatactctatgcattcattagctaggacaacaatgcatttgcagtagtgagatttcgctaaaaaattaaagccatttactatgaaaaaaaaaaaaaaaaaa

SEQ ID NO: 1910 - DNA, 342 bp, HOMO SAPIENS
  misc_feature (92)..(92): n is a, c, g, or t
gaagcaagatcccaatatagtttacattactaaatatggtaaatgtcaaatattttcatatgggattcccactgatatttatcgaaaccagncatgccatgtacccactcagtccgaataaaaatatcagagtgggaagggaccttagagacaatctggcctaatactcttattttgcccatgaggaaactgagcttcataggggtcaagtaacttgcgaaaagtcacacagctaggtagtggcagatctgcaactaaaattcaggcctttgattttagtccattcaatgtacaatattcataggttatgtcctctatacagagcactggactagcactaga

SEQ ID NO: 1911 - DNA, 82029 bp, HOMO SAPIENS; identical to SEQ ID NO: 297

SEQ ID NO: 1912 - DNA, 2203 bp, HOMO SAPIENS
gtctgcatccggtggccacagagcaacttcctctagagggagctgattggagccgggtgccgctggcacctctatgatcactggagtctcgcgggtccctcgggctgcacagggacaagtaaaggctacatccagatgccgggaatgcactgacgcccattcctggaaactgggctcccactcagcccctgggagcagcagccgccagcccctcgggacctccatctccaccctgctgagccacccgggttgggccaggatcccggcaggctgatcccgtcctccactgagacctgaaaaatggcttcggggcaaggcccaggtcctcccaggcaggagtgcggagagcctgccctgccctctgcttctgaggagcaggtagcccaggacacagaggaggttttccgcagctacgttttttaccgccatcagcaggaacaggaggctgaaggggtggctgcccctgccgacccagagatggtcaccttacctctgcaacctagcagcaccatggggcaggtgggacggcagctcgccatcatcggggacgacatcaaccgacgctatgactcagagttccagaccatgttgcagcacctgcagcccacggcagagaatgcctatgagtacttcaccaagattgccaccagcctgtttgagagtggcatcaattggggccgtgtggtggctcttctgggcttcggctaccgtctggccctacacgtctaccagcatggcctgactggcttcctaggccaggtgacccgcttcgtggtcgacttcatgctgcatcactgcattgcccggtggattgcacagaggggtggctgggtggcagccctgaacttgggcaatggtcccatcctgaacgtgctggtggttctgggtgtggttctgttgggccagtttgtggtacgaagattcttcaaatcatgactcccaagggtgccctttggggtcccggttcagacccctgcctggacttaagcgaagtctttgccttctctgttcccttgcaggggtcccccctcaagagtacagaagctttagcaagtgtgcactccagcttcggagggcccctgcgtgggggccagtcaggctgcagaggcacctcaacattgcatggtgctagtgggccctctctctgggcccaggggctgtggccgtctcctccctcagctctctgggacctccttagccctgtctgctaggcgctggggagactgataacttggggaggcaagagactgggagccacttctccccagaaagtgtttaacggttttagctttttataatacccttgtgagagcccattcccaccattctacctgaggccaggacgtctggggtgtggggattggtgggtctatgttccccaggattcagctattctggaagatcagcaccctaagagatgggactaggacctgagcctggtcctggccgtccctaagcatgtgtcccaggagcaggacctactaggagaggggggccaaggtcctgctcaactctacccctgctcccattcctccctccggccatactgcctttgcagttggactctcagggattctgggcttggggtgtggggtggggtggagtcgcagaccagagctgtctgaactcacgtgtcagaagcctccaagcctgcctcccaaggtcctctcagttctctcccttcctctctccttatagacacttgctcccaacccattcactacaggtgaaggctctcacccccatccctgggggccttgggtgagtggcctgctaaggctcctccttgcccagactacagggcttaggacttggtttgttatatcagggaaaaggagtagggagttcatctggagggttctaagtgggagaaggactatcaacaccactaggaatcccagaggtgggatcctccctcatggctctggcacagtgtaatccaggggtgtagatgggggaactgtgaatacttgaactctgttcccccaccctccatgctcctcacctgtctaggtctcctcagggtggggggtgacagtgccttctctattgggcacagcctagggtcttgggggtcaggggggagaagttcttgattcagccaaatgcagggaggggaggcagatggagcccataggccaccccctatcctctgagtgtttggaaataaactgtgcaatcccctcaccctgaaaaaaaaaaa

SEQ ID NO: 1913 - DNA, 3589 bp, HOMO SAPIENS
cggccgccctggggacgcagacgccaaggcccctccggccagggccgggagccgggccggcctagccagttctgaaagccccatggccccagcaggcctctgagccccaccatgggcagcttgtactcggagtacctgaaccccaacaaggtccaggaacactataattataccaaggagacgctggaaacgcaggagacgacctcccgccaggtggcctcggccttcatcgtcatcctctgttgcgccattgtggtggaaaaccttctggtgctcattgcggtggcccgaaacagcaagttccactcggcaatgtacctgtttctgggcaacctggccgcctccgatctactggcaggcgtggccttcgtagccaataccttgctctctggctctgtcacgctgaggctgacgcctgtgcagtggtttgcccgggagggctctgccttcatcacgctctcggcctctgtcttcagcctcctggccatcgccattgagcgccacgtggccattgccaaggtcaagctgtatggcagcgacaagagctgccgcatgcttctgctcatcggggcctcgtggctcatctcgctggtcctcggtggcctgcccatccttggctggaactgcctgggccacctcgaggcctgctccactgtcctgcctctctacgccaagcattatgtgctgtgcgtggtgaccatcttctccatcatcctgttggccatcgtggccctgtacgtgcgcatctactgcgtggtccgctcaagccacgctgacatggccgccccgcagacgctagccctgctcaagacggtcaccatcgtgctaggcgtctttatcgtctgctggctgcccgccttcagcatcctccttctggactatgcctgtcccgtccactcctgcccgatcctctacaaagcccactactttttcgccgtctccaccctgaattccctgctcaaccccgtcatctacacgtggcgcagccgggacctgcggcgggaggtgcttcggccgctgcagtgctggaggccgggggtgggggtgcaaggacggaggcggggcgggaccccgggccaccacctcctgccactccgcagctccagctccctggagaggggcatgcacatgcccacgtcacccacgtttctggagggcaacacggtggtctgagggtgggggtggaccaacaaccaggccagggcagaggggttcatggagaggccactgggtgaccccagatagagacttggggctactgagccagatgcccccgccccacagacctgggtgatgttgcaaatatttcacacctggaaaggccagataaggcactgactagtcacatagcagtgttgcagtgcggtcctgagggccagtccagtggctagtgtgacccctttagaactggatcctggggaggccagggcaggggacctgtgaagagccagggtgagggcaggcagcatttaaggggagctcagggcaggagcactttaccacctggtacaaaggatttttttttttttttgagacggaatcttgcactgctgcccaggctggagtgcagtggcgtgatctcggctcaccgcaagctccgcctcctgggttcatgtcgttctcctgcctcagcctcccaagtagctgggactataggcgcctgccaccacacctggctaattttttgtacctttagtagagatggggtttcaccgtgttagccaggatggtcttgatctcctgacctcgtgatccgcccgcctcggcctcccaaagtgctgggattacaggcgtgagccaccgtgcccggctttttttttttttttttttttttttttttttttttttgagatgaagtctcgctctgttgcccaggctggagagtgcagtggtacggtctcagctcactgcaacctccacctcccaggttcaagcgattctccagcctgagcctcctgagtagctgggattacaggtgcctaccaccacgcccaggtaattttttttttttttgtatttttagtagagacggggtttcaccatgttggccaggctggtctcgaactcctgacctcatgatccgcccgtgttggcctcccaaagtgtgggattacaggcgtaagccacctcacctggcggtacaaagaatttctgcattttcttccctggcccctagtcctgcaccgatttctccttttcgaatgtattcctcctgccaccttctctgggcaacttcgtgcgactacagaaccactgtcctgaggagctagaggcctcctctctgaccatccagagcccaaatccacagcttccccaaatttcatcagctgccacttgacgacttctccccgtctctctgaggcccggaaaccacggctggaggtggggaggggatggcggctgaggtccattcctcattctcagacctcattgctcagttgcactatttggggcacagaataatcaccaaaagtgagaaaaacgagtttgggtggctggggaggactttgggactcttgatgcaaggcgcaacttgagaaaattctgggtgtgatatttgcacagacaccctcctttcaaaaacagccaccccccaagctattctcagctccacacctgcagccccagctaaggtaccaggtctcctgagcaaggcagagagaagccttgagccttctctgtgtcttctttcaagaaccccgctgtgtcttctttcaagattttttttttgagacagtttcaagatttttgttttgtttttgagatggagtctcactgtgtcacccaggctgaggtggcagtggttcaatctccgttcactgccacctccacctcccgggttcaagcgattctcctgcttcagcctctcgagtagctgggactacaggcacctgccaccatgtctggctaatttttgtatttttagtagagacagggtttcactacgttggccaggctggtctcaaactcctgacctcaagtgatccgcccgcctcggcctccccaattgctgggattacaggcgtgagccactgtgcccggccttcttctttcaagttatatagaatggagcatgggggtggcagtggctagggacatttcctggggacactctcccctaaccccccagaaggacttcacaaaaacctgtggataatggaagggatgttacggtacaaacgtatatttatgtgtgtgtgtgtgtatgtgtgtgcgcgcgcgcgtgtgcacataggcgtgatgtctgtgaccctcctctcctcgtcacatttcccccagaatgaatgctgtcctgtctgctcatgtttgtgttgaagctgccaaagtcggggagctctggtcctgcccagacccctttggaattgctggcccatcctcccactggagagctggggtgcagctcaccttggggaaggaaacctcatgcctcagagtaatttcttgtgaatgcaaagcctgggggagcgggtctttggggggcaaggagccagtcaggggcttgtttcccctcatagagctccccagacgtgcctccgcaatgcctgaaacccagacctaggctaataaacggttcaatttctgttaaaaa

SEQ ID NO: 1914 - DNA, 373 bp, HOMO SAPIENS
  misc_feature (78)..(78): n is a, c, g, or t
gaagagttgtattgcctcaatttgtaaagcttaaaaatgtttgcctttataatttaagaacaccttggctaggtgacnagtttttacttcttgtgagcggtaggccacaggagtatggtaagagaagcaacaggacaaagagcttgatcttgttctcctttgttgtggagcccttacatgttttaaacatgaactacttagcaacaattccatgtttctttaggggaaaatagcaaccagaacaaaacaccagaaacacacaataatatctttattaccttgaagtacacaaagatcttaaaaacaaacaaacaaaaaaccaagacataaaaattactaccataaaaggggaaaaaatgtggagctgggtatg

SEQ ID NO: 1915 - DNA, 7412 bp, HOMO SAPIENS; identical to SEQ ID NO: 736

SEQ ID NO: 1916 - DNA, 5707 bp, HOMO SAPIENS
cggggcggcggcgggggccgggggggcccgggcgcgcgggagcgggagcggccgggggagccggagcgcaccatggaggcggcggcaggcggccgcggctgtttccagccgcacccggggctgcagaagacgctggagcagttccacctgagctccatgagctcgctgggcggcccggccgctttctcggcgcgctgggcgcaggaggcctacaagaaggagagcgccaaggaggcgggcgcggccgcggtgccggcgccggtgcccgcagccaccgagccgccgcccgtgctgcacctgcccgccatccagccgccgccgcccgtgctgcccgggcccttcttcatgccgtccgaccgctccaccgagcgctgcgagaccgtactggaaggcgagaccatctcgtgcttcgtggtgggaggcgagaagcgcctgtgtctgccgcagattctcaactcggtgctgcgcgacttctcgctgcagcagatcaacgcggtgtgcgacgagctccacatctactgctcgcgctgcacggccgaccagctggagatcctcaaagtcatgggcatcctgcccttctcggcgccctcgtgcgggctcatcaccaagacggacgccgagcgcctgtgcaacgcgctgctctacggcggcgcctacccgccgccctgcaagaaggagctggccgccagcctggcgctgggcctggagctcagcgagcgcagcgtccgcgtgtaccacgagtgcttcggcaagtgtaaggggctgctggtgcccgagctctacagcagcccgagcgccgcctgcatccagtgcctggactgccgcctcatgtacccgccgcacaagttcgtggtgcactcgcacaaggccctggagaaccggacctgccactggggcttcgactcggccaactggcgggcctacatcctgctgagccaggattacacgggcaaggaggagcaggcgcgcctcggccgctgcctggacgacgtgaaggagaaattcgactatggcaacaagtacaagcggcgggtgccccgggtctcctctgagcctccggcctccataagacccaaaacagatgacacctcttcccagtcccccgcgccttccgaaaaggacaagccgtccagctggctgcggaccttggccggctcttccaataagagcctgggctgtgttcaccctcgccagcgcctctctgctttccgaccctggtcccccgcagtgtcagcgagtgagaaagagctctccccacacctcccggccctcatccgagacagcttctactcctacaagagctttgagacagccgtggcgcccaacgtggccctcgcaccgccggcccagcagaaggttgtgagcagccctccgtgtgccgccgccgtctcccgggcccccgagcctctcgccacttgcacccagcctcggaagcggaagctgactgtggacaccccaggagccccagagacgctggcgcccgtggctgccccagaggaggacaaggactcggaggcggaggtggaagttgaaagcagggaggaattcacctcctccttgtcctcgctctcttccccgtcctttacctcatccagctccgccaaggacctgggctccccgggtgcgcgtgccctgccctcggccgtccctgatgctgcggcccctgccgacgcccccagtgggctggaggcggagctggagcacctgcggcaggcactggagggcggcctggacaccaaggaagccaaagagaagttcctgcatgaggtggtcaagatgcgcgtgaagcaggaggagaagctcagcgcagccctgcaggccaagcgcagcctccaccaggagctggagttcctacgcgtggccaagaaggagaagctgcgggaggccacggaggccaagcgtaacctgcggaaggagatcgagcgtctccgcgccgagaacgagaagaagatgaaagaggccaacgagtcacggctgcgcctgaagcgggagctggagcaggcgcggcaggcccgggtgtgcgacaagggctgcgaggcgggccgcctgcgcgccaagtactcggcccagatcgaagacctgcaggtgaagctgcagcacgcggaggcggaccgggagcagctgcgggccgacctgctgcgggagcgcgaggcccgggagcacctggagaaggtggtgaaggagctgcaggaacagctgtggccgcgggcccgccccgaggctgcgggcagcgagggcgctgcggagctggagccgtagattccgtgcctgccgccgcagcgccgccgacaacgcgggtgcaggggggcgcggctgggcggtgcagctccgcccggctccgcccctgcagcccacacagcacaacgtcttaccgtgcctattaccaagcgagtgtttgtaaccatgtagttttggaacccactgcaaaattttctactggccaagttcaagtgagtaagccgcgtcccccaactacagctggagacggggccagctcggcggcctgctggtcctctgcttgctggaacattctaacatttacacttttgttataagctatttaaaaccagtaaggagacttgaaattcagaaaatcaacacatttttaaatgactaacttctaaaagccccaacacatgacgccatctgaagacccgcaacggagtgggggtggcggccgccccaccctccccacccggggaagccatcacagctcatctgcccgcggctgcgtgaggacagcaggggtttttcttcagagtctattttttcagcgacaaggacccaggtcttcctgctgctgccagggagagcagggacagtgccgcgtgcgagatgagctcgaacactgcccgccttactgccgcctaccccgcccgccacgccgccgtcgatgccagcgctgtccccacgggtaccaggaagtgcagagccgcacaggagctgccccggagctgaggggacggtcttcggctcctctgcaccccgtgattctgcccacgctcctccaccacgaggcactgacctgcgtcgggtggtgaccgtggctggcggtcacgccctcagcccctccgggcacacgtgccgcctgaccgggcgacccttttcagttcggcaaacgtcgctcccttcattttgggactgaggctgcagcattggaacaaaagagcattatttcaatttttctttctttttttttgttcgttcatttaaacgtatatttagaactgcactttgtccacaaccttcccttctctttctattccccagtgaactgaggtttttaccgatttatagagcagtcaaatccgaagtgctcgagtgcttagaaaccccctctggtgcttggttgaacaagggaatcacaagaaaacgaaaatgcaaaaactgaacttcgggggtcgttctgtgccttccagcatcttgtacagcaaatcctgactcgtgtctttttacccccaagatatctgtcttcagtagcgactgaatctgccactctcagaataagttccttgcatttattccaaataatctcgtttactctcacctgtttatgcaaattgtataaggtttcttatgcccaagcttgaaaaatgatttcccagtagacaagaggcggctacctatcctacagttacggtatttatttacataagaagatcttacaggagttctttgcttgaatccgttctaacacccgcggcagctgcacgcgctcacagaaggtggaggttacttgcccaggtacagacgacctcggggcagtgacgagcaaagaccagagactgctgagccctcgcatctgggtggcggaattgcctgcggggttttgcccttggtttactgaggggggtcttggttgctgctgaagccccccaccccttctaaagtgcaatgcaaaagggacatcatgtatatgcagcgtttgtttggaattttctttgcttttgttttctttgcggttgttctgtgtgcatggattccacacctctgccgtaggtagatccgtcagcgggcattattaccgtgtcttgtaaagggtcggttttgttatgcaacatgcagaatgctgtttttagccttgttttaccagagttgttttttttttcagttatttcttcaagggaaactaaatgatttagttggagcaaagctttaagtgtgttggcgtgcttctgtgtggctgtcctgtgtcgccaggtcgaagatcacagtgaggtagaggccctgccccatccccagggccgccaggcttgctccgtttgctttgagtttttagaccccagagggagatgagcttttccaagctgtgtctgggccagagcctctccttgcccttgctccatcccgacggtcaccgttgggtccacgcctccaccgccccatcttgccccaaacggaaagcgctgtatctgcagtggcagcccttccccacttcggctctgggagggtccagccagtgtcacctgggcccaccctttcctgcagctgccaggcccgtgcggtcagtgggacccggacgtgggcaggcgagctcgggaccctcccaggcagttcccacagctcttgcctcggctcaccagggtcacttccactgtcaggggcctgagggggcagctgtggctgcagggctgctctggactgaggggtcccaggccccgaggggtgcacgcctggctccccttggcacaggtgcgagtccgtttcttttcagcagaagggggaagaggtgtccgctgtgtgggctgctgactcctctgtgtgtgaggcccttcatctaagtgattgtgtattcagtttaattctcattatatttctatactgaaagaagatttttaacgaagggaaaaacaacagcaataacattcatatctctggagcagctaactcatacacgtaatgtctgcttttcgtacagaactagccaatgtaaaaacagttcacctgtaaatactttttcctttttcaccgttgtattatacatgtatatgctgggtcctttttcagaaactcttttcttacctgagagttgtcttgttttctgggctgtttttaactgaggaaaaaaaaaatgctttcctgccggggggcaggggagacggagaaacccatgtgcgtttcccatgtgaccccctcctccctgtgggtctgagccccggccccccccacctcctcctccctgtgggtccgaaccccggcccccccaccccctcctccctgtgggtccgaaccccggcccccccaccccctcctccctgtgggtccgatccccggccccccccaccccctcctccctgtgggtccgaaccccggccccccccccaccccctcctccctgtgggtccgaaccccggcccccccacccctccctcagcccaccagggtccagggagatgttcgttctcgctttaagtcaggagtcacaaatgacttttttttttcaattaaggaaaaagctccatctctacctttaacatcacccagacccccgcccctgcccgtgccccacgctgctgctaacgacagtatgatgcttactctgctactcggaaactatttttatgtaattaatgtatgctttcttgtttataaatgcctgatttaaaaagaaaagagcttggcatatttatctatttcgctgtgtacctgttagtccttccccgaccccgaaacagatgacattgtacaataaaggactttgagagga

SEQ ID NO: 1917 - DNA, 662 bp, HOMO SAPIENS
accgccgacgcagacccctctctgcacgccagcccgcccgcacccaccatggccacagttcagcagctggaaggaagatggcgcctggtggacagcaaaggctttgatgaatacatgaaggagctaggagtgggaatagctttgcgaaaaatgggcgcaatggccaagccagattgtatcatcacttgtgatggtaaaaacctcaccataaaaactgagagcactttgaaaacaacacagttttcttgtaccctgggagagaagtttgaagaaaccacagctgatggcagaaaaactcagactgtctgcaactttacagatggtgcattggttcagcatcaggagtgggatgggaaggaaagcacaataacaagaaaattgaaagatgggaaattagtggtggagtgtgtcatgaacaatgtcacctgtactcggatctatgaaaaagtagaataaaaattccatcatcactttggacaggagttaattaagagaatgaccaagctcagttcaatgagcaaatctccatactgtttctttcttttttttttcattactgtgttcaattatctttatcataaacattttacatgcagctatttcaaagtgtgttggattaattaggatcatccctttggttaataaataaatgtgtttgtgct

SEQ ID NO: 1918 - DNA, 2834 bp, HOMO SAPIENS
gccagccgtgggattaggcttcgccggctacgattgcggcccccatcttctgacttttcctcgtgtgacccatcttttcaaattcccttacctgaggaaggagcccgattacaaggatatttacctgctcctaccctgatctagggacgaggatgggaagaccgcctgtggccatgagccctccccggtgctcctggggctaaggctggggctgcagccatggggctgggtcagccccaggcctggttgctgggtctgcccacagctgtggtctatggctccctggctctcttcaccaccatcctgcacaatgtcttcctgctctactatgtggacacctttgtctcagtgtacaagatcaacaaaatggccttctgggtcggagagacagtgtttctcctctggaacagcctcaatgaccccctcttcggttggctcagtgaccggcagttcctcagctcccagccccggtcaggcgccgggctctcctcaagggctgtggtgctggcccgggtgcaggccctgggctggcatgggccgctgctggcgctgtcgttcctggcgttctgggtgccctgggccccagctggcctgcagttcttgctgtgcctgtgcctctatgatggcttcctgacgctcgtggacctgcaccaccatgccttgctggccgacctggccctctcagcccacgaccgcacccacctcaacttctactgctccctcttcagcgcggccggctccctctctgtctttgcatcctatgccttttggaacaaggaggatttctcctccttccgcgctttctgcgtgacactggctgtcagctctgggctgggctttctgggggccacacagctgctgaggcggcgggttgaggcggcccgaaaggacccagggtgctcaggcctggttgtggatagcggcctgtgtggagaggagctgcttgtaggcagtgaggaggcggacagcatcaccttgggccggtatctccggcagctggcacgccatcggaacttcctgtggttcgtgagcatggacctggtgcaggtcttccactgccacttcaacagcaacttcttccctctcttcctggagcatctgttgtccgaccatatctccctttccacgggctccatcctgttgggcctctcctatgtcgctccccatctcaacaacctctacttcctgtccctgtgccggcgctggggcgtctacgcggtggtgcgggggctcttcctgctcaagctgggacttagcctgctcatgttgttggccggcccggaccacctcagcctgctgtgcctcttcattgccagcaaccgcgtcttcactgagggcacctgtaagctgctgaccttggtggtcactgacctggtagacgaggacctggtgctgaaccaccgcaagcaggcagcctcggcactcctctttggcatggttgccttggtgaccaagccaggccagacctttgccccgctgctgggcacctggctgctctgtttctacacaggtcatgacctcttccagcagtccctcataacccctgtggggagtgcccatccctggccagagcccccagctccagcccctgcacaggccccgacgctccgccagggctgcttctacctgctggtgctggtgcccatcacctgtgctctgctgcagctcttcacctggtcccagttcacgctgcatgggagacgcctgcacatggtcaaggcccagcgccagaacctgtcacaggcccaaaccctggatgttaagatggtgtgagagctgtggcaaggtcaccccactgaggatgctgctggcagcctggggaaggagccagttttttttggttttttttttaaggatttcatagttttttttttttttttttggagctgttgcccaaaaaaatggatctgttgcagtggtgcaatctgggctcactgaaaccaccacccaggttcaagcaattatcctgcctcagcctcccgagtaggtgggattataggagcgtgccaccatgcccggctactttttgtatttttagtagagacagggtttcatcatgttggccaggctagtctcaaacccctgaccttaggtgatcagcccgcctcggcctcccagagtgctgggattacaggcgtgagccactgtggccaacctaatttttgtattatttagtagagacagggtttcaccacattggccaggctggtctcgaactcctgacctcaagtgatctgcctgccttggtctcccaaagtgctgggaatacaggcatgagccaccgcactcggccaggagctagttttaccagcaccctgctccactgccttcctctagtgcagcctggaagacatggcagcgggtagctcctggggctgagccagaagcatcactgcagtgaaagtctctgcttacctgtctggctcagcttgggcaagggctgggccatatgtgctcagggacgtgcttctcttgtaaggcaggaggacagaagaggaccaagaagggagggggctgccctgtggtgcacacaggcctgccatggggcgtgggagcccatcccgctgcctgactggagctggccgctgtggtggactcaggaaccacttttaatactgcaactgctcccttttgcccagtcagggaaagctgactgtaagtcccacctcccactccgtccacccttctagtggtttctctgagaggtttctctgcttcagctgtgcttgaagtggcatgcctcctctgctgcagggctcccccacccccacacggcctctaaagatgtttatttccttatagactgattaaagtcagccattctttttcctcaa

SEQ ID NO: 1919 - DNA, 1964 bp, HOMO SAPIENS
ccagctgcagagaggaggaggtgagctgcagagaagaggaggttggtgtggagcacaggcagcaccgagcctgccccgtgagctgagggcctgcagtctgcggctggaatcaggatagacaccaaggcaggacccccagagatgctgaagcctctttggaaagcagcagtggcccccacatggccatgctccatgccgccccgccgcccgtgggacagagaggctggcacgttgcaggtcctgggagcgctggctgtgctgtggctgggctccgtggctcttatctgcctcctgtggcaagtgccccgtcctcccacctggggccaggtgcagcccaaggacgtgcccaggtcctgggagcatggctccagcccagcttgggagcccctggaagcagaggccaggcagcagagggactcctgccagcttgtccttgtggaaagcatcccccaggacctgccatctgcagccggcagcccctctgcccagcctctgggccaggcctggctgcagctgctggacactgcccaggagagcgtccacgtggcttcatactactggtccctcacagggcctgacatcggggtcaacgactcgtcttcccagctgggagaggctcttctgcagaagctgcagcagctgctgggcaggaacatttccctggctgtggccaccagcagcccgacactggccaggacatccaccgacctgcaggttctggctgcccgaggtgcccatgtacgacaggtgcccatggggcggctcaccaggggtgttttgcactccaaattctgggttgtggatggacggcacatatacatgggcagtgccaacatggactggcggtctctgacgcaggtgaaggagcttggcgctgtcatctataactgcagccacctggcccaagacctggagaagaccttccagacctactgggtactgggggtgcccaaggctgtcctccccaaaacctggcctcagaacttctcatctcacttcaaccgtttccagcccttccacggcctctttgatggggtgcccaccactgcctacttctcagcgtcgccaccagcactctgtccccagggccgcacccgggacctggaggcgctgctggcggtgatggggagcgcccaggagttcatctatgcctccgtgatggagtatttccccaccacgcgcttcagccaccccccgaggtactggccggtgctggacaacgcgctgcgggcggcagccttcggcaagggcgtgcgcgtgcgcctgctggtcggctgcggactcaacacggaccccaccatgttcccctacctgcggtccctgcaggcgctcagcaaccccgcggccaacgtctctgtggacgtgaaagtcttcatcgtgccggtggggaaccattccaacatcccattcagcagggtgaaccacagcaagttcatggtcacggagaaggcagcctacataggcacctccaactggtcggaggattacttcagcagcacggcgggggtgggcttggtggtcacccagagccctggcgcgcagcccgcgggggccacggtgcaggagcagctgcggcagctctttgagcgggactggagttcgcgctacgccgtcggcctggacggacaggctccgggccaggactgcgtttggcagggctgaggggggcctctttttctctcggcgaccccgccccgcacgcgccctcccctctgaccccggcctgggcttcagccgcttcctcccgcaagcagcccgggtccgcactgcgccaggagccgcctgcgaccgcccgggcgtcgcaaaccgcccgcctgctctctgatttccgagtccagccccccctgagccccacctcctccagggagccctccaggaagccccttccctgactcctggcccacaggccaggcctaaaaaaaactcgtggcttcaaaaaaaaaaaaaaaaaaaaaaaaaaaaaa

SEQ ID NO: 1920 - DNA, 3142 bp, HOMO SAPIENS
ccgggtgagacaaatcgggcgccatcttgtcttgttcccgaagaagtagaagcatcgaaagcgttggagaggtgttaccggaacggcggcgacaagggtgttcccgaactagagtggatagaaaatcaagtatattttaaaagaagggatgtgggatcaaggaggacagccttggcagcagtggcccttgaaccagcaacaatggatgcagtcattccagcaccaacaggatccaagccagattgattgggctgcattggcccaagcttggattgcccaaagagaagcttcaggacagcaaagcatggtagaacaaccaccaggaatgatgccaaatggacaagatatgtctacaatggaatctggtccaaacaatcatgggaatttccaaggggattcaaacttcaacagaatgtggcaaccagaatggggaatgcatcagcaacccccacacccccctccagatcagccatggatgccaccaacaccaggcccaatggacattgttcctccttctgaagacagcaacagtcaggacagtggggaatttgcccctgacaacaggcatatatttaaccagaacaatcacaactttggtggaccacccgataattttgcagtggggccagtgaaccagtttgactatcagcatggggctgcttttggtccaccgcaaggtggatttcatcctccttattggcaaccaggacctccaggacctccagcacctccccagaatcgaagagaaaggccatcatcattcagggatcgtcagcgttcacctattgcacttcctgtgaagcaggagcctccacaaattgacgcagtaaaacgcaggactcttcccgcttggattcgcgaaggtcttgaaaaaatggaacgtgaaaagcagaagaaattggagaaagaaagaatggaacaacaacgttcacaattgtccaaaaaagaaaaaaaggccacagaagatgctgaaggaggggatggccctcgtttacctcagagaagtaaatttgatagtgatgaggaagaagaagacactgaaaatgttgaggctgcaagtagtgggaaagtcaccagaagtccatccccagttcctcaagaagagcacagtgaccctgagatgactgaagaggagaaagagtatcaaatgatgttgctgacaaaaatgcttctaacagaaattctgctggatgtcacagatgaagaaatttattacgtagccaaagatgcacaccgcaaagcaacgaaagctcctgcaaaacagctggcacagtccagtgcactggcttccctcactggactcggtggactgggtggttatggatcaggagacagtgaagatgagaggagtgacagaggatctgagtcatctgacactgatgatgaagaattacggcatcgaatccggcaaaaacaggaagctttttggagaaaagaaaaagaacagcagctattacatgataaacagatggaagaagaaaagcagcaaacagaaagggttacaaaagagatgaatgaatttatccataaagagcaaaatagtttatcactactagaagcaagagaagcagacggtgatgtggttaatgaaaagaagagaactccaaatgaaaccacatcagttttagaaccaaaaaaagagcataaagaaaaagaaaaacaaggaaggagtaggtcgggaagttctagtagtggtagttccagtagcaatagcagaactagtagtactagtagtactgtctctagctcttcatacagttctagctcaggtagtagtcgtacttcttctcggtcttcttctcctaaaaggaaaaagagacacagtaggagtagatctccaacaatcaaagctagacgtagcaggagtagaagctattctcgcagaattaaaatagagagcaatagggctagggtaaagattagagatagaaggagatctaatagaaatagcattgaaagagaaagacgacgaaatcggagtccttcccgagagagacgtagaagtagaagtcgctcaagggatagacgaaccaatcgtgccagtcgcagtaggagtcgagataggcgtaaaattgatgatcaacgtggaaatcttagtgggaacagtcataagcataaaggtgaggctaaagaacaagagaggaaaaaggagaggagtcgaagtatagataaagataggaaaaagaaagacaaagaaagggaacgtgaacaggataaaagaaaagagaaacaaaaaagggaagaaaaagattttaagttcagtagtcaggatgatagattaaaaaggaaacgagaaagtgaaagaacattttctaggagtggttctatatctgttaaaatcataagacatgattctagacaggatagtaagaaaagtactaccaaagatagtaaaaaacattcaggctctgattctagtggaaggagcagttctgagtctccaggaagtagcaaagaaaagaaggctaagaagcctaaacatagtcgatcgcgatccgtggagaaatctcaaaggtctggtaagaaggcaagccgcaaacacaagtctaagtcccgatcaaggtagtatactttttaaagtattttgtctgatttttaaaaaaaattgactgaatttattcaaagttgaaagtgtcctttctctctctctttaataaactcagtttggtacttgataaataatcatagtcttaaatgttagaaatcctatataatattatttatttaaaattgcagatttttaatttaaaatacatttttatttttaaattttgtcttttcccttttttttcagatcaacaacccctccccgtcgtaaacgctgaggaatgatgtggcaagaatgccatgatgttctttaaaaaaattccatgagttttaagggcttgtctcattatagaggcacattgtggctgtgtaggtgaaaccagaatcttttttttttttaatctgtaaataggtgtactttttccaatgctgctccaagttacttaataggatttctttgtattacgtttttttcaaaaaatatagtgcataataagactataaacatgccattctctttcagctgtaatgttcttaaaattattcttgaatgtactgtgatgtcaataaagctctttagttcatttttgttaaa

SEQ ID NO: 1921 - DNA, 2268 bp, HOMO SAPIENS
ccgcgatatttgggagcggccccgagacgcgcctggcgcggatcctaaatcccgacagctttatagagcccaggcctggcaggctcccagaacttgaagccaccagaccccacatggaaccaaaggcctcctgtccagctgctgcacccttgatggagagaaaattccatgttcttgtgggtgtcacggggagtgtcgcagccctgaagttgcctcttctggtgtcaaagcttttggacattcctgggctggaagtagcagtggtcacaactgagagagccaaacatttctacagcccccaggacattcctgtcaccctctacagcgacgctgatgaatgggagatatggaagagccgctctgacccagttctgcacattgacctgcggaggtgggcagacctcctgctggtggctcctcttgatgccaacactctggggaaggtggccagtggcatctgtgacaacttgcttacctgcgtcatgcgggcctgggaccgcagcaagcccctgctcttctgcccggccatgaacaccgccatgtgggagcacccgatcacagcgcagcaggtagaccagctcaaggcctttggctatgtcgagatcccctgtgtggccaagaagctggtgtgcggagatgaaggtctcggggccatggctgaagtggggaccatcgtggacaaagtgaaagaagtcctcttccagcacagtggcttccagcagagttgacctgggatttctgtcatgggtgtccctctgtactcagaatgggttcaggccaagtcggtgaagatggatgttggcaaaataggaggataccctcatttgctgaatgggggacctgctctgagcctgcccaggggccaggcctgctccaggttaaactggacggaaggcccaggtctcagtttctttcaaccaggagaggccgctgcctagagcccctccccaccttttcctggatgggtgaggcaagccaggagagcaagcagtgttgtcctcacgggaggaggactgagcgactgggaaaactcggctctacatctcacccagaacggcttttagaaacaccacagctggagagtcctggctgagccttgggagtttcagctctttggcggggtgcccaggtgccatgcgatcagcgaagcctgcgagttggcaggactctgaggtttcctgcagaccatgccatgagattgaaggtgcggggaaataaagaaaaatcaccatttaggagactccattctttccctacaacccagctgtggtcccagagatcagggggtgttgccaggtgtggctggggaagggtctgggttcacaactcaccggcactctttagtccccgtataacatggtggttaaggataaagatctgaagccagacagcccctagttccaatcccagctctgccgcttactagcagtggcagtttggttcaggacttagccttcctgaccttcacttacctcagctatcttgttatcctaccctcagggagttgttgagaggattcagtgaaattttgtgtgcagaatacccatgccactgagtgcctggaacgtagtaaatgtcaaatcaatggaagttaaaactaggcatgcatatatgccagagagctttcctagcatttactgcaatgccctgtctcattttgggaaaaaggaaatcctggatgctaagttgacacatccctttatgcaagtgacaggtaagcagccaggagggttgaccctgccctgggtcccaggcctcttgcctgcttcttggtttcctctgttctcatcctttcagctttgctggacctgaggcaggggcctgggtgtctgtgcctccctaccccccagtacacatgaccaagggaagtagatccagagacaccatgcactctggcccagaaaccctctgctacccagcttttgacttaattgccatttggtgtggctgcagcggggagggcttgtctgcgtatttggagctgaggctgaggctggcttcctgccctctggcttccaggccaggtgtgagggacatcccatgtgggctctgagagcactgagagtagaggtgccttgaggggaccaggaagcctactggctggaatcagtgctccagcagcctccacagcctttatctcaacagcacttgacttcaccaggtgaccctttgggataaaattgccttagggtatgaaataaactataactaaaatggtaaaaaaaaaaaaaaaaaaaaaaaaaaaaaaaaaaaaaaaaaaaaaaaaaa

SEQ ID NO: 1922 - DNA, 2564 bp, HOMO SAPIENS
cttgctcgcggagagaggagctaggagcctcggccaatgggagccggcgttgttggaggccacggcggcgcagccccaaagcgagcgaagctagggtcgccgccactgccgcaggaggcgtgaggggataaaaacattcagatggcagatcacagtttttcagatggggttccttcagattccgtggaagctgctaaaaatgcaagtaacacagaaaagctcacagatcaggtgatgcagaatcctcgagttctggcagctttacaggagcgacttgacaatgtccctcacaccccttccagctacatcgaaactttacctaaagcagtaaaaagaagaattaatgcattgaaacaacttcaggtgagatgtgctcacatagaagccaagttctatgaagaggtacatgacttggaaagaaagtatgcagcgctataccagcctctctttgacaagagaagagaatttatcaccggcgatgttgaaccaacagatgcggaatcggaatggcacagtgaaaatgaagaggaagagaaattggctggagacatgaaaagtaaagtagtcgtcacagaaaaagcagcggcaacggctgaagagccagatcccaaaggaattccagagttctggtttaccatcttcagaaatgtggacatgctgagtgaattagtccaggaatatgatgaaccaatcttgaaacacctgcaggatattaaagtgaaattttctgaccctggacagcctatgtcttttgtgttagagttccactttgaacccaacgactactttaccaactcagtcctgacaaaaacctacaagatgaaatcagaaccagataaggctgatcccttttcctttgaaggtcctgagattgtggactgtgacgggtgtactattgactggaagaaaggaaagaatgttactgtcaaaaccatcaagaaaaagcagaagcataagggtcgaggcactgttagaacaattacgaaacaagtacccaatgagtcctttttcaacttcttcaatccattgaaagcatccggggatggagaatcactggatgaagattctgaattcacattagcctctgattttgaaattggacactttttccgtgagcggatagtcccgcgggctgtgctgtacttcactggggaggccatagaagatgatgacaattttgaagaaggtgaagaaggagaagaggaggaattagaaggtgacgaggagggagaagacgaggatgatgcggaaattaaccccaaggtgtaatttttgtctgttaatcattcatacgtttctagaaggaacccagccagccggcggaatgcaagcagcagtaggaagcggaggcgggtgcctggcagaccggctgtcgggactccaggcctgtgggcggggcctcggtccttgccgcagcacaatcccgtggacagagcttactccatctaactcgttttcaagtgcatgattttcactttcacttttcctttttccttattattttgcttaacttgtacagtggcaactgaaatgcatttcagaaataggaggtttcgtccagcaccctctgcagccttggtgcctgtagctctggacttccctgggcctttccctgtgggagggccctgtagaccacatcagggtggggtgggggtcacttggcaaaaagggccgaggtctggtgatgtggttcccaggatctggaacctctcccacccctcctgcagttggactgaattcttccctttcatccgaagaaacccacttgctgtttccagccgctgaatctgctgagtgtgcagcctgcatcacctgctgtatgccgatcatctcagaaagggctgtgtagagtagggccctgttctccttaggatgttgcttcttgatttttttttttttttaggggtgggtcagggttgtgacacaccagcccaggtgagagctgctgcgggtcacctcatatttatttatcccttcttgcctgtgaggactgcggcttttcgctgtggctcgtccttaacgtttctgaaccaccttggtgccctgagcaggaagatgtgccacttcctagcaggcgcaaggcctgtgcggaagaaacgccgctccctgccaccagggctgaagatgcgagcccgtcctcatgacgcaggcgccaccctgctgccggagccgggcttcggcagtcttctccactgagggactgggctgggaagtcctgcgtttcagtggagcgtatgagcgtcaagtcctgctttctcagtagccccattgcggggccccaccattcatcctgtctgaaggtcctgggtttggtgtgaccgcttggcggctggtgggtggggttttcaagtgggtgacggcgctctccggcagccggggatggccgtgtccgcactgaccaggcctgtggagagtgctcggcctaaccttagaacacatttgtaactgaatacagtgttttcaatttgtacagaatagttagaatattctattaaagtggtgaaacattgagtcagcaaaaaaaaaaaaaaaaaaaaaaaaaaaaaaaaaaaaaaaaaaaaaaa

SEQ ID NO: 1923 - DNA, 4555 bp, HOMO SAPIENS
gcagttcccgcctcctcaggtccgggcgggtccctggccggggtagcacggaagggtctcccaggcggcgtagtagggcttccgtgttactggaaacctacttccggctgcaaatgggaaaaggagcctctaccttaaccaatccccgggaacctcaggcccgcggatgggagaaaccagagatgccaacttcctgcttccgaagtagtggctgggtcttaaagcaccgatgtttctgcattgaatagccctggaagacagaattcttgtctctccaaagatctggcagacttattcccaattataagagatccttgcaaaggaggtgtcttgcttcaccttcaccttccactgtgattgtaagttttctgaggcctcgccagccatgcagaactgaataggactagcaacttcatagacggttgtgaagacaagctagacggcagatgaaagttcttggcacagagtgaacacttgataaactatatggcagccacagcctccggagccgttgcacacctacctgcccggccgacttacctgtacttgccgccgtcccggctcacctggcggtgcccgaggagtagtcgctggagtccgcgcctccctgggactgcaatgtgccgatcttagctgctgcctgagaggatgtctggggtgtccgagcccctgagtcgagtaaagttgggcacgttacgccggcctgaaggccctgcagagcccatggtggtggtaccagtagatgtggaaaaggaggacgtgcgtatcctcaaggtctgcttctatagcaacagcttcaatcctgggaaaaacttcaaactggtcaaatgcactgtccagacggagatccgggagatcatcacctccatcctgctgagcgggcggatcgggcccaacatccggttggctgagtgctatgggctgaggctgaagcacatgaagtccgatgagatccactggctgcacccacagatgacggtgggtgaggtgcaggacaagtatgagtgtctgcacgtggaagccgagtggaggtatgaccttcaaatccgctacttgccagaagacttcatggagagcctgaaggaggacaggaccacgctgctctatttttaccaacagctccggaacgactacatgcagcgctacgccagcaaggtcagcgagggcatggccctgcagctgggctgcctggagctcaggcggttcttcaaggatatgccccacaatgcacttgacaagaagtccaacttcgagctcctagaaaaggaagtggggctggacttgtttttcccaaagcagatgcaggagaacttaaagcccaaacagttccggaagatgatccagcagaccttccagcagtacgcctcgctcagggaggaggagtgcgtcatgaagttcttcaacactctcgccggcttcgccaacatcgaccaggagacctaccgctgtgaactcattcaaggatggaacattactgtggacctggtcattggccctaaagggatccgccagctgactagtcaggacgcaaagcccacctgcctggccgagttcaagcagatcaggtccatcaggtgcctcccgctggaggagggccaggcagtacttcagctgggcattgaaggtgccccccaggccttgtccatcaaaacctcatccctagcagaggctgagaacatggctgacctcatagacggctactgccggctgcagggtgagcaccaaggctctctcatcatccatcctaggaaagatggtgagaagcggaacagcctgccccagatccccatgctaaacctggaggcccggcggtcccacctctcagagagctgcagcatagagtcagacatctacgcagagattcccgacgaaaccctgcgaaggcccggaggtccacagtatggcattgcccgtgaagatgtggtcctgaatcgtattcttggggaaggcttttttggggaggtctatgaaggtgtctacacaaatcacaaaggggagaaaatcaatgtagctgtcaagacctgcaagaaagactgcactctggacaacaaggagaagttcatgagcgaggcagtgatcatgaagaacctcgaccacccgcacatcgtgaagctgatcggcatcattgaagaggagcccacctggatcatcatggaattgtatccctatggggagctgggccactacctggagcggaacaagaactccctgaaggtgctcaccctcgtgctgtactcactgcagatatgcaaagccatggcctacctggagagcatcaactgcgtgcacagggacattgctgtccggaacatcctggtggcctcccctgagtgtgtgaagctgggggactttggtctttcccggtacattgaggacgaggactattacaaagcctctgtgactcgtctccccatcaaatggatgtccccagagtccattaacttccgacgcttcacgacagccagtgacgtctggatgttcgccgtgtgcatgtgggagatcctgagctttgggaagcagcccttcttctggctggagaacaaggatgtcatcggggtgctggagaaaggagaccggctgcccaagcctgatctctgtccaccggtcctttataccctcatgacccgctgctgggactacgaccccagtgaccggccccgcttcaccgagctggtgtgcagcctcagtgacgtttatcagatggagaaggacattgccatggagcaagagaggaatgctcgctaccgaacccccaaaatcttggagcccacagccttccaggaacccccacccaagcccagccgacctaagtacagaccccctccgcaaaccaacctcctggctccaaagctgcagttccaggttcctgagggtctgtgtgccagctctcctacgctcaccagccctatggagtatccatctcccgttaactcactgcacaccccacctctccaccggcacaatgtcttcaaacgccacagcatgcgggaggaggacttcatccaacccagcagccgagaagaggcccagcagctgtgggaggctgaaaaggtcaaaatgcggcaaatcctggacaaacagcagaagcagatggtggaggactaccagtggctcaggcaggaggagaagtccctggaccccatggtttatatgaatgataagtccccattgacgccagagaaggaggtcggctacctggagttcacagggcccccacagaagcccccgaggctgggcgcacagtccatccagcccacagctaacctggaccggactgatgacctggtgtacctcaatgtcatggagctggtgcgggccgtgctggagctcaagaatgagctctgtcagctgccccccgagggctacgtggtggtggtgaagaatgtggggctgaccctgcggaagctcatcgggagcgtggatgatctcctgccttccttgccgtcatcttcacggacagagatcgagggcacccagaaactgctcaacaaagacctggcagagctcatcaacaagatgcggctggcacagcagaacgccgtgacctccctaagtgaggagtgcaagaggcagatgctgacggcttcacacaccctggctgtggacgccaagaacctgctcgacgctgtggaccaggccaaggttctggccaatctggcccacccacctgcagagtgacggagggtgggggccacctgcctgcgtcttccgcccctgcctgccatgtacctcccctgccttgctgttggtcatgtgggtcttccagggggaaggccaaggggagtcaccttcccttgccactttgcacgacgccctctccccacccctacccctggctgtactgctcaggctgcagctggacagaggggactctgggctatggacacagggtgacggtgacaaagatggctcagagggggactgctgctgcctggccactgctccctaagccagcctggtccatgcagggggctcctgggggtggggaggtgtcacatggtgcccctagctttatatatggacatggcaggccgatttgggaaccaagctattcctttcccttcctcttcggccctcagatgtcccttgatgcacagagaagctggggaggagctttgttttgggggtcaggcagccagtgagatgagggatgggcctggcattcttgtacagtgtatattgaaatttatttaatgtgagtttggtctggactgacagcatgtgccctcctgagggaggacctggggcacagtccaggaacaagctaattgggagtccaggcacaggatgctgtgttgtcaacaaaccaagcatcagggggaagaagcagagagatgcggccaagataggaccttgggccaaatccgctctcttcctgcccctctttctctttcttcctttactttcccttgcttttccctcttttcttactcctcctctttctctccccaacccccattctcatctgcacccttcttttctcatgtgtttgcataaacattcttttaacttctttctatttgacttgtggttgaattaaaattgtcccatttgc

SEQ ID NO: 1924 - DNA, 894 bp, HOMO SAPIENS
gcccgtcttcgtgtctcctccctccctcgccttcctccttcctagctcctctcctccagggccagactgagcccaggttgatttcaggcggacaccaatagactccacagcagctccaggagcccagacaccggcggccagaagcaaggctaggagctgctgcagccatgtcggccctcagcctcctcattctgggcctgctcacggcagtgccacctgccagctgtcagcaaggcctggggaaccttcagccctggatgcagggccttatcgcggtggccgtgttcctggtcctcgttgcaatcgcctttgcagtcaaccacttctggtgccaggaggagccggagcctgcacacatgatcctgaccgtcggaaacaaggcagatggagtcctggtgggaacagatggaaggtactcttcgatggcggccagtttcaggtccagtgagcatgagaatgcctatgagaatgtgcccgaggaggaaggcaaggtccgcagcaccccgatgtaaccttctctgtggctccaaccccaagactcccaggcacatgggatggatgtccagtgctaccacccaagccccctccttctttgtgtggaatctgcaatagtgggctgactccctccagccccatgccggccctacccgcccttgaagtatagccagccaaggttggagctcagaccgtgtctaggttggggctcggctgtggccctggggtctcctgctcagctcagaagagccttctggagaggacagtcagctgagcacctcccatcctgctcacacgtccttccccataactatggaaatggccctaatttctgtgaaataaagactttttgtatttctggggctgaggctcagcaacagcccctcaggcttccagtga

SEQ ID NO: 1925 - DNA, 218 bp, HOMO SAPIENS
tccctccccaactagcttgcagggatttctgatcacctagtagagtctagaggcgtaagggaaggaggtcaccaaggggcaggccaggctttatgtgaatagtgctgttgtgagccaagtacttgagtacttcgaggtccccttctactgcagacatcttccctatggttcctgtgacccaggtttgtctcagagtggggttagcacacggtaccatc

SEQ ID NO: 1926 - DNA, 3747 bp, HOMO SAPIENS
gccccgcttcccacatcggccccagcccctgcctgggtccccatccaggacccccttccagtctctgcccctggcctggcccccatcccggcctcggccctcgttccaccccctgtcacaaatcccagcccaggccctgtcccagccccattcccagtgtttgcttaaggccctggctcaaccccgtcccttgctgcagtccccatcacagcccttccttccatcccactccctgcccttgttcaagccccagtgtccagcccagcccaacccattatctcagcctttgccctcatctctgtgtttacccaagtctctccctctagtcccccctatctctcatactctgcccctctcccagcctagactcaagtctgggtttcagctgccgccagccctattgctgctgttgctgttctctgtccttggcccaggggctggaggccttttcctgactgattactccacctgctcaccccgcaagctgagtcctttccgctcctttgccagcaccgagctcttccacttccatgttcctgaggacacattcctggctgtttggaacctcatcatcttcaaggagcaagggggaacttttggggaccactgcccagaccaaagtgtgactgtgtatttccggtccggggcaccccctgtcatcaatcccctgcatacacacttcccaggggacacagctgtgcctggggttttctcactgaccctcagctggacactgcccaaccgcacctcaggcatctttaacgtcagcagccccttacctggggactggttcttggctgcccaccttccccaggcccacggccacatctctgtcaagggtctccaggatgagtgtcagtacctccttcagccgcagctgattgtccggcgtttgctggacgtcgctgtgctggttcctggccggccctcagagcaaaccctctccccacacaatcgctcagccctgtacaaggtctttgtgcccagcttcacttacagggtttcagcacagctggtgtgtgtggggggccgtggggtatctgcctgccccctgtcactgcgtctgcgtcccaaagccccacccctgcacaactcaagctctgtggcctgtggaggtgcctcaggatgccagctggagctggcactgcccccctgggggcactgggtctacgtgcgtgtggaaacatcatcccggggccctggtaggaccatccgcttccagctgtgtgtgcggttgcaagagtgcccacagcccggcctgctccgagccctggtccctggagctgccatgaacatgccccagtccctgggcaaccagccactgcccccagaaccgccatcccttggaacccctgcggaggggcctgggaccacgtccccacccgagcactgctggccagtgcgcccgactctgcgcaacgagctggacaccttctctgtccacttctacatcttctttggcccaagtgtggcccttccccctgagcgcccagccgtgttcgccatgaggctgttgccagtgctggacagtggaggcgtcctcagcctggagctccagctcaatgcgagctccgtgcgccaggaaaacgtgacggtgtttggatgcttgactcacgaggtgcccttgagcctgggggatgcagcagtgacctgttccaaagagtccctggccggcttcctcctctctgtcagtgccaccaccagggttgccaggctgcgaatcccattcccgcagacggggacctggttcctggccctccgctccctgtgcggggtggggcctcggttcgtgcggtgccgcaacgcgacggccgaggtgcggatgcgcaccttcctgtccccatgcgtggacgactgcgggccctacggccagtgcaagctgctgcgcacacacaattatctgtacgcagcctgcgagtgcaaggccgggtggagaggctggggctgcaccgacagtgcagatgcgctcacctatggattccagctgctgtccacactcctgctctgcctgagcaacctcatgtttctgccacctgtggtcctggccattcggagtcgatatgtgctggaagctgcagtctacaccttcaccatgttcttctccacgttctatcatgcctgtgaccagccaggcatcgtggttttctgcatcatggactacgatgtgctgcagttctgtgatttcctgggctccttaatgtccgtgtgggtcactgtcattgccatggctcgtttacagcccgtggtcaagcaggtgctgtatttgctgggagctatgctgctgtccatggctctgcagcttgaccgacatggactctggaacctgcttggacccagtctcttcgccctggggatcttggccacagcctggacagtacgcagcgtccgccgccggcactgctacccacccacgtggcgccgctggcttttctacttgtgccctggcagccttattgcaggcagtgccgtcctgctttatgcttttgtggagacccgggacaactacttctacattcacagcatttggcatatgctcattgcgggcagtgtgggcttcctgctgccccctcgtgccaagactgaccacggggtcccatctggagcccgggcccggggctgtggttaccagctatgcatcaacgagcaggaggagctgggcctcgtgggcccaggaggggccactgtcagcagcatctgtgccagctgagaggggctttgggcctggccctgaggggatatgaatgcttcctagagttctttctgggggtgtggagccctcttagaaggagacaggctgtatttcttgaggacatggagtctttctcaaggacacaaaactcttccagggacctggagcccttcccaggacatggagaacttcctgagggcctggagtccccctgcatcatggagtccttcttaaggactggagcctatgcaggcacagagtccctcaggaccaaggagtccctcctgcaggtgtggagcctttcctgggatgcagagccttcccaagacatggattccttcccagggagacaaagccctgtcaggagcacagcatctttccagaggaggtggagtctatcttggggaaaccaaatttccagattttcccagaggctcagcaactctggcctcaggcttccttcccagaggcagcgtctgggctgtgctgtgctgtggaggagggattgcaggatggatggagctgggactggggctgtctgggtggctggtatcctcgtttgatacaggtggagtctgtgtgtctccagtgattgattggttcagaatggttctgtgatgccttttttccccctggggtcaggggtgtggggaagtggggaaagagggcccctcagggaatcagcagggctgatgggagctactgccggaggcttttgtcacaccctgtacacagtctgatcccgctcatctgggccctgcattcatttctaaacagtttctaatgcctattccccaattcctattgagcccgatttgcagtatctgaggggtgtgtgtgtgtgtgtgtgtgtttatgtatgtatacgtatgctgagatgatttaaatcagtgagacagactttccttatgatgcccacacccaacacagaaggaagccgaggtcccaggaaattggaatagcaggtacacgtctcaggtgtgcaagaaatatcacaagaatgtaacttctgttttgagcccccaaaaaaaaaaaaaaaaaaaaaaaaaaaaaaaaaa

SEQ ID NO: 1927 - DNA, 443 bp, HOMO SAPIENS
  misc_feature (26)..(29): n is a, c, g, or t
  misc_feature (37)..(37): n is a, c, g, or t
  misc_feature (42)..(42): n is a, c, g, or t
  misc_feature (48)..(48): n is a, c, g, or t
  misc_feature (55)..(55): n is a, c, g, or t
  misc_feature (131)..(131): n is a, c, g, or t
  misc_feature (156)..(156): n is a, c, g, or t
  misc_feature (196)..(196): n is a, c, g, or t
  misc_feature (286)..(286): n is a, c, g, or t
ggatgtggcacgaagctgcatctgcnnnnaagcaccntattnccatgngtgaggntaactggaaactcacttgctgggtgcagatagcttccaaactattgtgatgctcatgcttgacttcccaaggaacntgtttcaggaaaggccattgccctnattatggtctttgataagcaggaagaagtttgttgttccnttttttttcttaatgccctacttcgtgcaacatacatccaatcagtcatatcctattgacgctacccctaaatatctctgggcctggccngtgctcagggcactgccttcattcagttactgcacttgcctgctgcctgtgctcctggtctcctgcttggactcccccaggccagcagccacactactgccaaaatccagtcgaaaattaacttcaggtaaagcacaattccaaacctaacactgcc

SEQ ID NO: 1928 - DNA, 5085 bp, HOMO SAPIENS
agcgccatgcgcagactcagttcctggagaaagatggcgacagccgagaagcagaaacacgacgggcgggtgaagatcggccactacattctgggtgacacgctgggggtcggcaccttcggcaaagtgaaggttggcaaacatgaattgactgggcataaagtagctgtgaagatactcaatcgacagaagattcggagccttgatgtggtaggaaaaatccgcagagaaattcagaacctcaagcttttcaggcatcctcatataattaaactgtaccaggtcatcagtacaccatctgatattttcatggtgatggaatatgtctcaggaggagagctatttgattatatctgtaagaatggaaggctggatgaaaaagaaagtcggcgtctgttccaacagatcctttctggtgtggattattgtcacaggcatatggtggtccatagagatttgaaacctgaaaatgtcctgcttgatgcacacatgaatgcaaagatagctgattttggtctttcaaacatgatgtcagatggtgaatttttaagaacaagttgtggctcacccaactatgctgcaccagaagtaatttcaggaagattgtatgcaggcccagaggtagatatatggagcagtggggttattctctatgctttattatgtggaacccttccatttgatgatgaccatgtgccaactctttttaagaagatatgtgatgggatcttctatacccctcaatatttaaatccttctgtgattagccttttgaaacatatgctgcaggtggatcccatgaagagggccacaatcaaagatatcagggaacatgaatggtttaaacaggaccttccaaaatatctctttcctgaggatccatcatatagttcaaccatgattgatgatgaagccttaaaagaagtatgtgaaaagtttgagtgctcagaagaggaagttctcagctgtctttacaacagaaatcaccaggatcctttggcagttgcctaccatctcataatagataacaggagaataatgaatgaagccaaagatttctatttggcgacaagcccacctgattcttttcttgatgatcatcacctgactcggccccatcctgaaagagtaccattcttggttgctgaaacaccaagggcacgccatacccttgatgaattaaatccacagaaatccaaacaccaaggtgtaaggaaagcaaaatggcatttaggaattagaagtcaaagtcgaccaaatgatattatggcagaagtatgtagagcaatcaaacaattggattatgaatggaaggttgtaaacccatattatttgcgtgtacgaaggaagaatcctgtgacaagcacttactccaaaatgagtctacagttataccaagtggatagtagaacttatctactggatttccgtagtattgatgatgaaattacagaagccaaatcagggactgctactccacagagatcgggatcagttagcaactatcgatcttgccaaaggagtgattcagatgctgaggctcaaggaaaatcctcagaagtttctcttacctcatctgtgacctcacttgactcttctcctgttgacctaactccaagacctggaagtcacacaatagaattttttgagatgtgtgcaaatctaattaaaattcttgcacaataaacagaaaactttgcttatttcttttgcagcaataagcatgcataataagtcacagccaaatgcttccatttgtaatcaagttatacataattataaccgagggctggcgttttggaatgcaatttgcacagggattggaacatgatttatagttaaaagcctaatatgcagaaatgaattaagatcattttgttgttcattgtgcagtatgtatatagcataatatacacagtgaattataggtctcaggcttacttgatttttggctattttatatttagtgtacacagggctttgaaatattaatttacataaaggccttcatatattattacgtgttatatattacgtgttataaatttattcaataaatatttgcctagaattcccaagacctttataggtgattttgttttctgggctccttaacttcataaatagctagtatcttccagcagtagtaacagtctggataacttcttccatatccctccctctttgtttttttgagacagtgtcactttgtcacccaggctggagtgcaatggtgtggtctcggctcactgcaacctccacctcccgggttcaagtgattctcccgcctcagcttcctgagtagctggaactacaggcgtgtgccaccacacccggctaatttttcgtatttttagtgtagacggggtttcactatgttgcccaggctggtctcgaactcctgaccgcgtgatccaccacctcagcttcccaaagtggtgggattacaggcgtgagccaccgcacccggcctccatatcccccttttaaaattctgtagtgtatggtaagtcatatcagatatcagacctaatttaaatttcattttagctttacaagtccaaaaacacagaatttatatattcagatactctagcactaattttagtcttaaaatattcccacgatattctgtacacaaaatgttctttttgttacaagagctgagttgcatatactgtagataaatcatattatttttgccaatttcacaaattcctctggcccatcatgtcagtcattattgagtatatgcacacattgctacttatttgattatgtatcttttaaattgattcagtgcatagaaaactatctcttacaaactttaagtgctctgatatgacttcccccccaaattttattatgaacatttttaaaaacagaaaaattgaaaaactgtttggtaagcacatgtatatctaccatttagattcagcagttgttaatgttttgtcatttgttttctctatacctatatatgtatagatacagctagttatgcatatatatgcatatatgtgtttgtttgtgtatgtatatatgcttttttccccctgaaccatttggatgttacagacatacttatcaccgtgaaaatacttcaagtatctcctacagataatgacattctcctaaaaatccgtaataccattgtaaaagtaataattccccaatatcatctaatcaagccatatttaaatttctgaagttaactccaaatttctttatagctgattatttcaaactaggatccaattaaagtttacatatgacacttggttataactctttagttggatataacattattattattttgataaaatatggaacaaatcaattctattaataagtggtcacatttgttttgggcttaaattactttttaaagatactggattttcctaagatttctgatttacactgatatttttttttgtcattcttaattgcatcacacaatagatgtaaatgaagatgtagtcacctcagataaaattggtatcgtgtatgataatattgtatcatttatatttgccttatgttaactttaagaaattgatttttttgtattaatcattttcccattgcaacagagctatattttttctattttaagaatcatattttaggattatttttggcaaatacagtgagcacttatgtaaccagatgataatgaactcaaatgtcatgatagcttgcataaatggtgactctagtagatttgactcaagcacttctagaatcatgcactgaattcaaaagaaaaatcttgctgctttttgtccagggcttgttctattcaacttctaatttgaaagctgtacaaagtaatagaagttccatttaaatatgagttcaaaactgtatttactttttatgtggccctctctttaggggattctaattttacttagggtctctaagtgcagcataatgttcctgatgttaacagaagactgtatttttaaagttacaaatttgtatatggaattaagtaatggcgctatatacgctgttgtggggaggggggaagaaaaggaggaaccaattaaataggaccttttaaaaattgttaattttgtaaactttgcttctcttataagttattgtgattcattttagttactgtgttttattttgaaaatatttaaatattgcacttctataaatagtatgataaatgcacagacaattgcagtaaattcttttttaagctaggatatttgaaatgacaacctttggttaagtgtgtcaaggttgcaacagaattttcacaatttttttgttgtttgcaaattgttactaatattgaagaggtaagggaggcaatgcaaatgatttttaatctttttttattatcttttcagcagtttatattttttgtgactttatgcaaccatatttttactttgtcttgacaactgaaagatgtataaggttttttgccagaaatgtactgtatacatagttttaagtataacagattttactgatatgtaaaaattttgccattaaaataaatgatttctcactgagaggaacttttctaccaggttggggcatatgggagcttaatatatcatatctaatttaaaataatttcactgaaataaactccattgcttttacctaatttttttcttgagatgcttttgtagtttttcagagttttagatgattttatacaaaatcctctgcctagcactgctctttttgatgttgtagtgacaccatttacattgaattaatgcttggtagcctggggctagatgtggaactccatggatctgtgttctgactggcacctttggaatgaaagaaaagtgtgtgctgtccaaattttttccccttaattctttccctcatcttctcacccataatagaaattttatttccattgtgagttctgacaagaatgaaattccacatacaacataactgtaaattgttggtaggtagaagttaatatttgtggttcatgtatattttgaccagagtatatttaagtatataatttcagcttccttgatttagaaatatgatataataaagaaaaactccatttatcatctgtta

SEQ ID NO: 1929 - DNA, 3031 bp, HOMO SAPIENS
gtggtagcggttattcggcggcccgcggcggaccatggccctggccctggcccggcgtcgctgggctttcctcacggcgtccccgagcagcgtcgcagagcgggccgacttccgggaaggaactgaccagcgactgagcggcggccggcgcgcttagcgccctgaacatgcggcagtccctgcgggcgaccccgggctccggacaggcggcggcggaggcggcggctcgggagggaaggaggcggcggcgccggcggaggtggcggcggagacggccggcgcccggcgcggagccctagggaggcagttcagcgcggcctcgggcctcgtcgagaaggatgctgtcccgaaagaaaaccaaaaacgaagtgtccaagccggccgaggtgcaggggaagtacgtgaagaaggagacgtcgcctctgcttcggaatcttatgccttcattcatccggcatggtccaacaattccaagacgaactgatatctgtcttccagattcaagccctaatgccttttcaacttctggagatgtagtttcaagaaaccagagtttccttagaactccaattcaaagaacacctcatgaaataatgagaagagaaagcaacagattatctgcaccttcttatcttgccagaagtctagcagatgtccctagagagtatggttcttctcagtcatttgtaacggaagttagttttgctgttgaaaatggagactctggttcccgatattattattcagacaatttttttgatggtcagagaaagcggccacttggagatcgtgcacatgaagactacagatattatgaatacaaccatgatctcttccaaagaatgccacagaatcaggggaggcatgcttcaggtattgggagagttgctgctacatctttaggaaatttgactaaccatggttctgaagatttaccccttcctcctggctggtctgtggactggacaatgagagggagaaaatattatatagatcataacacaaatacaactcactggagccatcctcttgagcgagaaggacttcctcctggatgggaacgagttgagtcatccgaatttggaacctattatgtagatcacacaaataagaaggcccaatacaggcatccctgtgctcctagtgtacctcggtatgatcaaccacctcctgtcacataccagccacagcaaactgaaagaaatcagtcccttctggtacctgcaaatccatatcatactgcagaaattcctgactggcttcaggtttacgcacgagcccctgtgaaatatgaccacattctgaagtgggaactcttccagctggctgacctggatacataccagggaatgctaaagttgctcttcatgaaagaattggagcagattgttaaaatgtatgaagcatacagacaagcccttcttacagagttggaaaaccgaaagcagagacagcagtggtatgcccaacaacatggaaaaaatttttgagctgattttttaaaaatttaagttttgtaagagctttaaaatattttcacagataaaaaattgcaaacaagtactctggttaataaatgctgcttcctttgtggaaattataaaattctaactttacatgtattttgttattagaaattttcttttattgaatgagaaaaattagtctatcattttaagagccaatatggcaaacactttcaaatactgtatattaggaaactgttttggtattcttgatggaaaaaaacgcagcggaaatgtcattatgaacagatgttaaataggaaattattacttgttaacttcttacagcagtagtaccttctttaaaaaaaaaaaagaatctgcggtatttttttaaaaaaaaagtttaccgctgtagtgtgaaatattgtctggaaagggatggtttaaatattaccatgatgtagttgaaatataaaataggatttggaaccttattgtgataaatatttatatatgatgtatgtttgtctcccctctccaaagtaaggaacccagctgggcgtggtggctcactcctgtaatcccagcattttgggaggccgaggtgggtggaccgcttgagtccacgagtttaagaccagcctgggcaacatggtgaagccccatctctacaaaaaatacaaaaaaattagccgggtatgatggtgtgtgcctctagtcccagctacttgggaggctgaggtcagaggatggcttgagcccaagaggcagaggttgcagggtcaagatcgcaccacttgcactgcagcctgagagagagagagccagaccttgtctcaaaaaataaaaaataaaaaaataaaaacaaaataaggaatccttttaaagcatgttgagaaagtattttttggtatgaatgggtgacgggccttttaatctttcaggaatacatataagcaggaatacttagcctgtattgggaaggtgcgtgaaactcaaagttgctaacatcatcttccttattttcagccagtgctgttactgcatttagcatggctctgacgaggcagtggagagttcctgacagcatagcatactgccttctgacagactgggttaagctaccaaaaatgacaaccagggattcaaaaaaaatttttggtcattaaatcgaatgtatattattactttttaattttctaagtatttatcacaggactttaacaccatatatttccctcccagtttttctccccttttggtttaatagttaaaacatttttcataattagtgctgtacatttgattgcaaacaaattggtgatacttctaaactataactataaatctctagaattctgtgaatttcaacattatttgaagtagttcttcagttatatttacatgtgttgtaaatatgtaaatatacttttagcttaggaagtcttccagaatacaaactactcccagttagatatcagtgagtttgaataactgaagaaatgttgacaatgttaagtgtttgattttatataacaagcttattaaatatatttttgtgg

SEQ ID NO: 1930 - DNA, 1126 bp, HOMO SAPIENS
gtggcgagggcggtgcctgggggcaggggcctcctcggagggcggcggggacagacccgtcgccccggctccgcagccccgccccggccccgcctccgctccggccgccgaaggctataagatctaggaacccgagccggtggtagggcgggcgcggaccgtgctgggagcggcgcggctggagcgcagcgccgaagggactggcagggctgaagtgtgcgggacagcaagcccccgaatagccccggctgccacctcgcaggacccaaggccacgcgcgccgggcccagctgagccgcctcatgaagccgcccgcggcgcagggcagccccgcggccgccgcggccgcagccccggccctggactcggcggccgcggaggacctgtcggacgcgctgtgcgagtttgacgcggtgctggccgacttcgcgtcgcccttccacgagcgccacttccactacgaggagcacctggagcgcatgaagcggcgcagcagcgccagtgtcagcgacagcagcggcttcagcgactcggagagtgcagattcactttataggaacagcttcagcttcagtgatgaaaaactgaattctccaacagactctaccccagctcttctctctgccactgtcactcctcagaaagctaaattaggagacacaaaagagctagaagccttcattgctgatcttgacaaaactttagcaagtatgtgaaacaagaagttctgggtcctttcatcataagggagaagcttcagaaagttccgaggacctgctaaaatcagctactagaatctgctgccagaggggacaaagacgtgcactcaaccttctaccaggccactctcaggctcaccttaaaatcagcccttgatcccatttctgggcaatttagacagtgaaactgactttgtttacctgcttgcagcatattagaacagacgatccatgctaatattgtattttctcttaaaacatagctttcctgtaatttaaagtgcttttatgaaaatatttgtaattaattatatatagttggaaatagcagtaagctttcccattataatatatttttgtatacaaataaaatttgaactgaagtctgcaaaaaaaaaaaaaaaaaa

SEQ ID NO: 1931 - DNA, 2591 bp, HOMO SAPIENS
gactccgctgcggcggcgtggctgtgggtcccggattagcggcggcatgggacggttgagttggcaggtggcggccgcggcggctgtgggcctggctctgactctggaggcgctgccttgggtgctgcgctggctgcggtccaggcggcggcggccgcggcgcgaggcgctgttcttcccgtctcaggtgacctgtaccgaggccctgctgcgggctccgggcgcggagctggccgagctccccgagggctgcccgtgcggcctgccccacggcgagagcgcgctaagccgcctgctgcgtgccctgctggccgcccgcgccagcctggatctctgcctgttcgccttctccagcccgcagctgggccgcgccgtgcagttgctgcaccagcgtggggtgcgagtgcgggtcgtcaccgactgcgactacatggccctcaacggctcgcaaatcggtctgctgcgcaaggcagggatccaggtccggcacgatcaagacccaggctacatgcatcacaagtttgccatcgtggacaagagggtgctcatcactggctcgctcaactggaccacgcaagccatccagaacaacagggagaatgttctcatcacggaggacgacgagtacgtgcggctttttctggaagaatttgagcgcatctgggaacagtttaaccctacaaagtatacctttttcccaccaaagaaaagtcacggaagctgtgccccacctgtctccagagctggagggagattgctttcatggcacagaacttgcggcacctccagcgaaagccaaacctaaccaagaatggggctgagccctccctgcgggctgctgtgcgttctgagggagggagacctcggcactagaaaaaaatcgttaaactaaagtctcgtctattagaatactaaattgaactaaagaaggttaggaaagggaaatttctgttacttcgggtcagttatttcgggccagacctttttcttgctcctttgccaaaataacttcagtcacgacctgccacggggtgctttcatgagtgtggtccgtatcttggtttggaatcgaaacttctgctacagcacagaaaaggcacagtgcctcttccaggtcgatcccattcccttccctgattctagaaaagtccctcctgctttggctgatgtgggccctttcagcatctccctgagatttcatccctctctccatgtggcacgactggggttggttggggcctacagtctccttgtccctcacagtctgcccctgtcagggctcggtcctcagagtaaggaaaggaaatggaagtcaggaggaagggaagatgtgagtgtgcggtgcgggtggcaaaagcagccttcggggcaaccccgtgagcgtcattgccaccaaaggctggctgttcccttgattccttgcataattgctctttaaaaccagtatgcacgccagtgccaagctcttcagcagcctgtccttgggtagtaagtgctgtggtctgtcaggactgatggccagcagctgtttctatgttgggcttttaactttttttattttatttatttatttatttatcttttttgagatggagtctcactctgtggcccaggctggagtgcagtggcacaacctcggctcactgcatcctctgcctcctgggttcaaacgattgtcctgcctcagcctcccgagtagctgggattacaggtgcctgccacaacacctggctgattttttttttggtatttttagtagagacagggtttcaccatgttggttaggctggtctcaaactcctgacctcaagtgatccaccacttccgcctcccaaagtgctgggattacaggtgtgagccgccatgcccggccgggcttttaacttttaatgtcctaatgttaaggtaattttgttgtgtgtttagaagtgaccttacctttaacacctgtggagttagtgcgtgcacattgctggctcagcgtaacccatcacgggaccggaggagaggagagcggggaagaggagagcagcttcaggccgtggtgtctcccacgtctgtgttcttatttgcagctcagggtttgcattcccaggtagaacaggtgtcgtacactgtgaaatgttccaggttatttgtttataatgtgtgtgtcatatacagatagctccgatgacatctgaagttgtgacttcatcatcttgtcatatttctgtatgatgagccccagggcccatcctgaggtctgctagccatgtgcttagtctcacctccccagcccacgctggcattaccacccagagacccttcagtgctgtgtgtttttcctttttagggttacttttgactcacagtgttaggcaagccagcttggaagttaacttttaaaaaaattcaattgaagctgtaaagtataatatatagattggaagtcaccagaaattgttttagtttgtgaattcccccagtgtatgttctgaaaagaaaatgggagagcttgtaaagcatctcctaaatgcgaagccgcgtgaccctggacttctggcacatctgaataaacatgttcttattctggaaaaaaaaaaaaaaaa

SEQ ID NO: 1932 - DNA, 8421 bp, HOMO SAPIENS
ttgtcagtcccgcggagccagaggaggcgccggtcgctggcagctgagcggcggaacccttcgctggcgggagcgcggttcggggccgcagaggtcaagagacaactgcctttgaaagagagtgagtgactgtttccaaaacagcaagcatagggagagccgccggaagtattgacggaaagcttgaattacctacatgattgatgatggtctccagctgtcaaagaagattgtggttgccaagagaaaggtaaccatttctcatccccttgagtggaattggatgcctctaggagcccacattggctggcagtagacatggccgaatttacaagctacaaggagacggcctccagccgccacttgcggtttaagctacagagtctaagccgccgccttgatgagttggaggaagccacaaaaaacctccagaaagcagaggatgaactcctggatctccaggacaaggtgattcaggcagaaggtagcaactccagcatgttggcggagattgaagtgctgcgccagcgggtgctgagaattgaaggcaaagacgaggaaattaagagagcagaggatctgtgtcgtctgatgaaggagaaacttgaagaggaagaaaacctcacccgggagctgaaatctgagattgagcggcttcagaaacgaatggctgaattagagaagctagaagaggccttcagcaggagtaagaatgactgtacccagctgtgtctgagcctgaatgaggagagaaatctgaccaagaaaatctcctctgagctggaaatgctcagagtcaaagtgaaagaactagaatcttctgaggaccgcctggataaaactgagcagagtttagcgtcagagttagaaaagctgaaatcattaactctgagctttgtaagtgagagaaaatacttgaatgaaaaggagaaagaaaatgagaaattgataaaagaactcactcaaaaactagagcagaacaaaaaaatgaaccgagattatacaaggaatgcttctaatctggaaagaaatgacctacggattgaggatggcatctcttccacactgccgtccaaagaatcaagaaggaagggtggtctggactacctaaagcaggtagagaatgaaacaagaaacaaatcagaaaatgaaaagaaccgcaatcaggaagacaacaaagtcaaagaccttaaccaagagattgagaaacttaagacacaaatcaaacactttgaatcgttggaagaagagcttaagaaaatgaagtccaaaaataacgaccttcaggataattacctaagtgaacaaaataaaaacaaattattagccagccaactggaggagataaagctacaaatcaagaaacagaaagagttagaaaatggagaggtagaaggggaagatgctttcctgtccagcaaaggcagacatgagaggactaagtttagaggccacggaagtgaagcttctgtgtccaagcacacagcgcgggaactgtctcctcagcataagcgggaacgactccggaacagggagtttgctctcaacaatgaaaactattctctgagcaacaggcaggtttcttctcccagtttcaccaacaggagggcagcaaaagcttctcacatgggggtgagtacagacagtgggactcaggagacaaagaaaactgaagaccggtttgtacccggctcctcccagagcgaagggaagaagtctagggagcagccctcagtgctgagtcgctaccccccggctgctcaggagcacagtaaagcgtggaaggggacttccaagccaggcaccgagagcggactgaagggaaaagtggagaagacaacacgaacgtttagtgacaccacccatggatctgttcccagtgacccattgggtagagctgacaaggcttctgacacctcctctgagactgtctttggcaagaggggacacgtgcttggcaacggaagtcaagtaactcaggctgcaaactctggctgttctaaggccattggagccctggcctcatctcgaagatcctcctcagaagggctctctaaaggcaaaaaggctgccaatggccttgaggctgataacagttgcccgaattccaaggctcctgttctatcgaagtatccttatagctgtagaagccaagagaacatccttcagggattttcaacctcacataaagaaggggttaatcaacctgcagcagttgtgatggaagacagcagtccgcatgaagccttgaggtgtcgagtcatcaaatccagtggcagagagaagccagactcagatgatgacttggacatagcatctcttgttactgccaagttggtaaatacaaccatcactccagagccagagcccaaaccacagcctaactctagagaaaaggctaaaacccgaggggcacctagaacctccctatttgagaatgataaagatgctggaatggagaatgaatctgtgaaatctgtcagagcctccaccaataccatggagctcccagataccaatggtgctggggtaaaaagccaaaggccctttagccccagagaggcgttgcggtctagagccatcatcaaacctgttattgttgataaggatgtgaaaaaaatcatgggaggatctggaacagagactacgttggagaaacagaaacccgtctccaaaccagggccaaacaaagtgacaagtagcattactatatatccatctgacagcagcagccccagagctgctccgggtgaggccctgagggagaggcacacatccactagcaatatccaggtggggctggcagagctcacatcagttagcaaccatgtcagctccccttttgagctctccattcacaaacatgacatcaccctgcagcttgcagaagcggagagaatggcagatgggcccctgaaggacaggccagaaacagtggtctctcggagcagcattataatcaagccatcggatcctgtggagaggaatagccatgcacctccagcggagacaatcaggtggaaaagccatagtgccccttcagaagtgggcttctcagatgccagacatgttactgtgcggaatgcctggaagagtaggcgagacttgaaatctttagaagaccccccaactcgaataggtaaaaacgtggaatctaccaatagcaatgcctacacccagaggtcttccacagacttctcagaactcgaacagcccaggtcctgcctttttgagcagggcactcgaagggtaggaccaagttcaggggatgcccctgagccctcctccagaaggacccaaagtagcctcactgtgtcagaggtgcttacccgtcggaatcgggtaggagacaccatcactgtcgcagcctggaaccactcagcaagcatggaggaagaaggggaagactgtacactcagtgtctacaggcaactgcacaactccctggatccgtctgaactgcctgggaagcaggggctgccagagtctgggcgagtacgggccgaggaacgattacggccaaccaggccctgtgctgaggagaactgagcccgctgggtgtctgttgtctgccctctgctcctgcttctcagctcttccaccgtcctgccccacgaaggatccaaggccagttaaccaggcaagacacaagccttggctggaaaactgtggtagagccgggctgtggctcaggtaatttttgccatttggccagagggaatcagagactacaagctggacagtcacccaggcccaaccttccccaatgcacgagtcctctctctctccttgtccctgtccaccaagtagttggaccattctggcccccaaacaagggaagataaagtccccagcacacagcaggagtcaaaaattcttctcggctccttggtgggttgtttctggatcctagggcagcctctgtctgtgtggttaatgttctggtttctcagtctcctcactatatccacttcactcctcatttgcccaatgggctcaagtaccccataagatttaccagccatcagctctatctagggggctttcatttctttccccttggagttcttttcttcagacttaaagcagaaaggggtctgtgctgcctctaaaggattatgagactaccctttaggttgaagtttgacctggctcctggcttaccagtctcctggaagcagagcatgcagatactcatgcggatacccattggaatgacatcatccctccccaaccccagctctctctgctcaccttccaaaggcacctggaggtgcaagcctcatgcatctcctttcctgagcaccagtaatgctgctggcatcgcctgctttctctccagtggctggagacttcaagctgacttcattgtttccaccttgggaaaatccctaggctaagctgggcctgacccagcatcctctgccttctaggaagtgcccagcaagagggaaagcagacccctttagtcactccacaagcaatagctccatgagaggcatggactgtgagactactccctcctgttcctccttctccatcccccatggaggaggcatcgcactttaccaagctgatgcattcctacagaagtgggccccggatttctgcaagtcgactatcatgatgacttcgctggaggaaaggtgatacgtacatacgcattgagggcctcagctttatatagttcaaaatgcagcaaacttttcagaaagccacgtaaataaattggttaggttccttataccagtcacatggggaagttgaaaagaattgtatattcttggcagtgctttttctttagcattctgtcaattcaaagaagggatcctctttcaaaggctacctttatgaagtagacactattgccctcagaatgagagaacattaaactaccagtctggtaagctggatttttttccccatggctttacttccttgctgtgtgaccttgggtgagtcattgtcttcttggagcctcagtttccctgtctgtaaaatgagttctttgaaatggatgatctctaagggcaccaaatctggtattctaaggttctcctgttttcaccatctataatagtatgggatgatttttgcttgtggaaggtatcatccgtgtgggttcttccctcctgccctcaattgtttttctgggccttgttttttagtttctgtatgttttaatctcatggggatgagctcagagaagctccgtgggcctgtttcccaatctgcaaagtgtgaagggattagatgggatggtctctgaggctctttgtggcatcagccttgcccagtgccacacagtatctcctggcgttctaggagtctaggtattatggaaagtacccaagtctgtgtatctcctgttcctgtgcatctcctatgaatttcctggcaagaggaagactcaagacttcctccagaggaatttgtcttctctgccttcactcagcatgggaaccagtgttcatcctgaccttgtctgtatcagatttggcagtgaggaggcttggggagcacctaccttactttcagggacaggaatctattgctcatacttctgcttcccagagttttgccaatctaaaggcattgtcatgtggcctgcctttcctgtccacatccccacctctgatgctcaagatgctatttccaagatctcttactgctgcttctcctggcttactggccagaaactagctcactcaaggctgccatccttcacttgcagcctccctgccattctccttcactggttggcaaccttgagagttcaaagaaaatcaacctctgtggtggtcaactaaaggtattaggaaactaagtctgtggctcttctctgctgatggaaacagaagggcgccaagccatgcctaaaaagatctcgccaataattcttgtctttgagtgttggagccctggattctggtgctatagctcctggtgccaaagtctggatctttccacatttcagcagcaccaacatctgctgctactcaaaatgtcctgttgaagagggacagctgtgatgcccttttgctggggctgccatcttgaaatctgagtgcaataggatttgcttgtaacagttatttcaggatattttgtttctttaatctgcacactttctagatagattttatttttaagtgtcctcagcattgcagaaaataacattgtaatagcaagtaaaggctggaggctgtttctctgggcttcaaatggctggcaaggctggctctcaaatcccaaagttgggaggcatgtttctgaaaagcaactgaggtgtgactgtttggacccaggcctcatcatcaggggtcctggaggaagcctccaagtagaggggagacctggtagttgaatagttgtttaatcaagccaaatagtcccactgcccccggtcaacaaacccacttttatgacagttttcttccgcagcttggctcttaaattttactggcaggtgtatggttgttggagggttcctagtgagttgggggacctggcaatagagctgcttggttggaggaagtgaagctggcttagtaccagcagctgatctcttccacgtgctgctgctttttttgccactctgatactaaaccagagaaagctgcaggtggataaagaagctgtggctgttttttgcttttgggtggcaatgagaaagagtcacagtgtgggttaaagggatctgcagtggggccaaggatgccaccccaccctcagctgtaggcaagcttgcacataaataacccccgtcagtggagtgttcgggatgcagggggcactatagtgttcttggacttgtcgtcctggggcagttttagttctttatatttagtgggtcagtgccaagtgctaccacttcccaataaaggaatggggacccagaggctgggtccctggctaccttgttatgaggttttgttatttctctgacaagattgctttggaaagagctgcttttagggattattttttgaataccccgagtggggagcagggttctcctcaaagcctcacaaccataggatcataggaaaggggccctattttcctgctgcttcccagctcagaacatatactgaatggaatgtatttttaagagaataaagtctatttttttgtattttaaagattgagagggctaagaaagtagccctcaaataaactgttattgcattataggcccctttgttgggggcagcctgttggtccacacctacttgctcaggcaggtgctctggtctctctcacccctgccccttagagtctaggtgcagcagctccaagcatgggaccaaggaggccagaacctgtcgctggaaaccagggcaaagcagtggctcagggctccttgggtgcatgtgtatcattggagctgcctgtctgcatgtatcctctggcgcgaatgctctctgttggctctgcagtacaatatgtaaccaataaagctccctcgtttccgtatactctgtgcgagtctgtgatgccagttttgtcaatgtcatccctgtgtatcatctgtcttctatgcgttggcgcagctctagtatatttatttatttcattgtgtaatacttaaaattgggtattttacctaaccaattactgatactgcaaggactggaaacattaactgccctgatcctggtgtgcagattctttccattactgccacgaattctaagactagggggggaaaagccttctccgttttcatcttccagtcagatcaccaatatatataatgatgtcccttaactcacagtaagaaagaataaaaccacatttaagggacattacttggatttgcagtaacagtgtttatcatctatctgtcagtcagtcaggagcccctgggaaggaaccagcatgtaacatgtttttatcatcttatatggcaaaagggactttgcagataaggatgctgggatgaggcagaacatcctagatgatccaggtgggccttaaatgtaatcacaggtagtatccttttaagagagagacaaaagatttgactacaggagaaggcaatgtgatgatggaagcagaaactggagttatgtgctctgaggatggaggaaggagccacgagccttcccacacctagaagctgaaaagagcaaggaaatgaactgatcctccctgctctgagagcctctgtaatgaatgcagccctgtgtacccattttagactttaagcttccagaactttcgaatagatttctgtttttttaagagccactaagtttgtggcaatctgttaaaccagctgttacctaagcccttgatcctatgtagtgcgcttcccaaaatgtacaccaccacctttagtagaattgggaagttttagcacatacccatggagggaatcaggaataaaggcagactggtctcccaaaggctcag

SEQ ID NO: 1933 - DNA, 5068 bp, HOMO SAPIENS; identical to SEQ ID NO: 329

SEQ ID NO: 1934 - DNA, 2851 bp, HOMO SAPIENS
agccaatgggagttcaggaggcggagcgcctgtgggagccctggagggaactttcccagtccccgaggcggatcgggtgttgcatccatggagcgagctgagagctcgagtacagaacctgctaaggccatcaaacctattgatcggaagtcagtccatcagatttgctctgggcaggtggtactgagtctaagcactgcggtaaaggagttagtagaaaacagtctggatgctggtgccactaatattgatctaaagcttaaggactatggagtggatcttattgaagtttcagacaatggatgtggggtagaagaagaaaacttcgaaggcttaactctgaaacatcacacatctaagattcaagagtttgccgacctaactcaggttgaaacttttggctttcggggggaagctctgagctcactttgtgcactgagcgatgtcaccatttctacctgccacgcatcggcgaaggttggaactcgactgatgtttgatcacaatgggaaaattatccagaaaaccccctacccccgccccagagggaccacagtcagcgtgcagcagttattttccacactacctgtgcgccataaggaatttcaaaggaatattaagaaggagtatgccaaaatggtccaggtcttacatgcatactgtatcatttcagcaggcatccgtgtaagttgcaccaatcagcttggacaaggaaaacgacagcctgtggtatgcacaggtggaagccccagcataaaggaaaatatcggctctgtgtttgggcagaagcagttgcaaagcctcattccttttgttcagctgccccctagtgactccgtgtgtgaagagtacggtttgagctgttccgatgctctgcataatcttttttacatctcaggtttcatttcacaatgcacgcatggagttggaaggagttcaacagacagacagtttttctttatcaaccggcggccttgtgacccagcaaaggtctgcagactcgtgaatgaggtctaccacatgtataatcgacaccagtatccatttgttgttcttaacatttctgttgattcagaatgcgttgatatcaatgttactccagataaaaggcaaattttgctacaagaggaaaagcttttgttggcagttttaaagacctctttgataggaatgtttgatagtgatgtcaacaagctaaatgtcagtcagcagccactgctggatgttgaaggtaacttaataaaaatgcatgcagcggatttggaaaagcccatggtagaaaagcaggatcaatccccttcattaaggactggagaagaaaaaaaagacgtgtccatttccagactgcgagaggccttttctcttcgtcacacaacagagaacaagcctcacagcccaaagactccagaaccaagaaggagccctctaggacagaaaaggggtatgctgtcttctagcacttcaggtgccatctctgacaaaggcgtcctgagacctcagaaagaggcagtgagttccagtcacggacccagtgaccctacggacagagcggaggtggagaaggactcggggcacggcagcacttccgtggattctgaggggttcagcatcccagacacgggcagtcactgcagcagcgagtatgcggccagctccccaggggacaggggctcgcaggaacatgtggactctcaggagaaagcgcctgaaactgacgactctttttcagatgtggactgccattcaaaccaggaagataccggatgtaaatttcgagttttgcctcagccaactaatctcgcaaccccaaacacaaagcgttttaaaaaagaagaaattctttccagttctgacatttgtcaaaagttagtaaatactcaggacatgtcagcctctcaggttgatgtagctgtgaaaattaataagaaagttgtgcccctggacttttctatgagttctttagctaaacgaataaagcagttacatcatgaagcacagcaaagtgaaggggaacagaattacaggaagtttagggcaaagatttgtcctggagaaaatcaagcagccgaagatgaactaagaaaagagataagtaaaacgatgtttgcagaaatggaaatcattggtcagtttaacctgggatttataataaccaaactgaatgaggatatcttcatagtggaccagcatgccacggacgagaagtataacttcgagatgctgcagcagcacaccgtgctccaggggcagaggctcatagcacctcagactctcaacttaactgctgttaatgaagctgttctgatagaaaatctggaaatatttagaaagaatggctttgattttgttatcgatgaaaatgctccagtcactgaaagggctaaactgatttccttgccaactagtaaaaactggaccttcggaccccaggacgtcgatgaactgatcttcatgctgagcgacagccctggggtcatgtgccggccttcccgagtcaagcagatgtttgcctccagagcctgccggaagtcggtgatgattgggactgctcttaacacaagcgagatgaagaaactgatcacccacatgggggagatggaccacccctggaactgtccccatggaaggccaaccatgagacacatcgccaacctgggtgtcatttctcagaactgaccgtagtcactgtatggaataattggttttatcgcagatttttatgttttgaaagacagagtcttcactaaccttttttgttttaaaatgaacctgctacttaaaaaaaatacacatcacacccatttaaaagtgatcttgagaaccttttcaaaccagaaaaaaaaaaaaaaaa

SEQ ID NO: 1935 - DNA, 4959 bp, HOMO SAPIENS
gagctgcagtcagatccggggatggagggagccggagaagaggagtgagaaggccggggaggcaggccctgctgtcttcctgcaggccggcagcctgctggcagtggaggaccaggccgtccaggaaaggaaggggtcaggaggtcgggcagggcctcagcaggttcagacaagtccccagaagggagctgcaggcgccctcgagtccaggccccaagcctggctccggttgtccaaagagggcctaggccaggcctctggtgcggaaactgagtcacagccagacctcagggcacggcctagacgcttacgagccaaagttaggggtagagagcagagacctccggggggtctcagggagtagggggcttcagggcctcccagtctagagccggattggcgagttagacgcttgtagatccaaggttggattggggtggggtctctgggacgttggatcgctacgcaaggattggggggattcaagtgcttagagatcgaagtctgccctgggtagggggagtcagacaattggaaagcctaggtagttatttggggaggggtctctacgccttggcgaagcgcacagctgcatctttttggcttgaggcctgaggccttgtcgagaagcttccgtgaaagggtgggccagccgggccacgagaaagaaagtgaataaatcaggaatataagtgggcggggggcccctgagaggggggtcgcaaagggtgagacatggccaccaggcgtttaaccgacgctttcttgttgttgcggaataattccatccaaaaccggcagctgttagccgagcaagtgagtagtcacatcacctccagccctctgcattcacgtagcattgctgcggagctggacgagcttgctgatgaccgtatggcactggtgtcaggcatcagcttagatccagaagcagcgattggtgtgacaaaacggccacctcctaagtgggtggatggagtggatgaaattcagtatgatgttggccggattaagcagaagatgaaagaattggccagccttcatgacaagcatttaaacagacccaccctggatgacagcagcgaagaggaacatgccattgagataactacccaagagatcactcagctcttccacaggtgccagcgtgccgtgcaggccctgccgagccgggcccgggcctgctccgagcaggaggggcggctgcttgggaacgtggtggcctcgctggcgcaggccctgcaggaactctccaccagcttccggcacgcacagtcaggctacctcaaacgcatgaagaatcgagaggaaagatcccagcattttttcgacacatcagtaccactaatggatgatggagacgataacactctttaccatcggggttttacagaggaccagttagttctggtggagcagaacacactgatggtggaagagcgggaacgagagattcgccagattgtacagtccatttctgacctgaatgaaatattcagggacttaggggcgatgattgtagaacagggtacagtccttgacagaattgactataacgttgaacagtcctgtatcaaaactgaagatggtttgaaacagcttcacaaggcagaacagtatcaaaagaagaatcggaagatgcttgtgattttaatattatttgtcatcatcattgtgctcattgttgtcctcgttggcgtgaagtctcgataagtggcattgggttttcgtgtgtgccgcgcgtgtggatctcccgggtgtgaggggcttggcctgcgccccgccagctgcccgcagaggtgcagcctcgaggaatctgagggcgtcggggcagcgaacctttgcatccacggactcctccttccctagtcctgctcaagcggtccggggaatgggtttttgtttttccttcattgttgagaatttaaggacctttgatactgctgcacaatagagattgagttctgggatcagttataatatatattttttttagaaagagaaaatgagctgagagtttacaggcactgcagaagctgttcagtattatatgtgtatatgctatttttttagcagccatgtctgagcagaatgttaacataatttttggaaaaattttctttaaaccatctggtttttaagaaatttggtaccaaaaattgatgagtagaggcaaaaatgccccttcatctttctctatatattttccagttgaaaacaaactaagaagtcctttaagaatttataatccgttccccattaacttaatttagcttttccatcactgttaatgatcagagtaacaaagtgtgaaaaataagaaaccatcattgatgttaattaacacatttagatgggccagttaaaacagcttcataagttttaaattaattgtaaatggaatattcctcatttaaaatttttgcactgcattttctactgtaaaccaaaagaggttactaagcaaaaccacctaaatttaagttggtgatttaaatgaatctcacattaaaagaaagcttgacagtgttatgaaagccaccagactcagccagtgtgtccccatgggtatccccagccatccttgctcaatccattacttatatactaactacataatgacctgttcaaaccagactctatttaatgaactgtgaatttacacagaggccattttaaatgggtcaccccatttaggattagtggatctcaaattattaaccaaacatcactccatttcaaagtaaaatattccaccagcgatttgatttattggctcttccattgccactgagcaatgcccaggaagcaggcacattgccaaggactgggggcatcttgactaggaagctcctcgtttgtgtgagcgtgggtcagaccgccaaagtaggacttcatcgtttacctacctattatcaatatggtgcttgaatatattcctataactgtagaacagtgtggaaagtgatggtaactttgaagttgttcatgttttattggctttgttttaattgacactagtagagttttaatggtctttgtgtaaattttaatggcttttccattgtttttgcttctcttaaaaagtttaagaagaatatgacctcattaaatgtgctgttttatttggaccagtcacacaaaatgtctctctagagttgactttaaagttgtttacagaaatttaaactcaattccagagattgaagttgtccaaacagctcatgggcttagtgtccaaacccctgcccagccttccctttccaagttggtgccacctccaggtagccattggtggttttcctattactgatgtggctgtggaatgataaggtcctagaggggccctggcatttcaggaagcggacctggtattccctgacaaacattgcttaggaaagagggccggagaataagaagccagcacctcatcagtcagccctgcaatgtgagacttccgtagctgttgagagtcactgcaggtgttctttcatcccatctgattttaacccatggttgagacgttccaagttagatctgctgctcttaggtgtggggctgtccacattagggaacttgcctcaaaaacagtccacagtggcaataccggacttctgttcaagctttttaaagtgctgagccttacaaacccctgaaggaaggtgaccctttaagagaggatcatctttttttatatttattttcaccaaatagggtgatgagggttggtttttgttccctcaacccatttgggtaaaataacggatctgattagaaactgttttaaggaggggctgggctcggtggctcacgcctgtaatcccagactttgagaggccaaggcggtcacgaggtcaggagttcgagaccagcctagccaacatggtgaaaccccgtctctacaaaaaatacaaaaattagccgggtgggacacgcctgtaatcccagctactcaagaggctgaggcaggagaatagcttgaacccgggaggcagaggttgcagtgagccgagatcacaccactgcactccagcctgggtgacagagcgaggctccgtctcaaaaaaaaaaaaaaaaaattgttttagcgctgggtttcccaaggtgggagagacagacccagcctggagctggcccctggcctgtgtgctgacttcttggggtcctcaaaccactgtatttttctgttgagcctgtacttggggagagatcagtagcatttgaggaagtaagagaaaagaatcatggtacctcagggtttctttccctttactcgctggcagccattgtctgtgggcacctcatgtttttccacactctactgggccgtggaggtaacgatcacccaggccagtctcctctgcctgggatgcgccctctgagaggaggcctagcagggcaggctccctctgggcatccctggatgcagcctctggacacatgcctcctttaaagtgtccgggtgcagctcaggttgagtggaggtagaaggagaaacagacatgtttaccacgcgttttccaaagctcctgatctttcccaagattgtaactgaaaactgctgtctcttgttttgttcgttttgggggtggtggtgctggctgggccatgcttgtgaagtgatgtgtgtctctgatttaacggattcactgttttctctgctaattgagagagcgttatttacattatttatttgttttgacacaagtgctttcagtgttttatcctagctaatggcttcttaaaggtaataaaacccttccaacgtaattggtcagataaaactttttttcttgtatgcttaaataaagcaattagtgaagcacttctatccaaaatgacttttttgtccttttttaaaaccaatttactgttactggaaactttttgtacaataaagcaatcacgcagattaaagaacatcctgcaatcctagtattaattttaaaaaaaaaaaaa

SEQ ID NO: 1936 - DNA, 2430 bp, HOMO SAPIENS
cacacccgcactcctcccgggtttctgctctccgcccgtgtggagtggtgggggcctgggtgggaatgggcgtgtgccagcgcacgcgcgctccctggaaggagaagtctcagctagaacgagcggccctaggttttcggaagggaggatcagggatgtttgcgagcggctggaaccagacggtgccgatagaggaagcgggctccatggctgccctcctgctgctgcccctgctgctgttgctaccgctgctgctgctgaagctacacctctggccgcagttgcgctggcttccggcggacttggcctttgcggtgcgagctctgtgctgcaaaagggctcttcgagctcgcgccctggccgcggctgccgccgacccggaaggtcccgaggggggctgcagcctggcctggcgcctcgcggaactggcccagcagcgcgccgcgcacacctttctcattcacggctcgcggcgctttagctactcagaggcggagcgcgagagtaacagggctgcacgcgccttcctacgtgcgctaggctgggactggggacccgacggcggcgacagcggcgaggggagcgctggagaaggcgagcgggcagcgccgggagccggagatgcagcggccggaagcggcgcggagtttgccggaggggacggtgccgccagaggtggaggagccgccgcccctctgtcacctggagcaactgtggcgctgctcctccccgctggcccagagtttctgtggctctggttcgggctggccaaggccggcctgcgcactgcctttgtgcccaccgccctgcgccggggccccctgctgcactgcctccgcagctgcggcgcgcgcgcgctggtgctggcgccagagtttctggagtccctggagccggacctgcccgccctgagagccatggggctccacctgtgggctgcaggcccaggaacccaccctgctggaattagcgatttgctggctgaagtgtccgctgaagtggatgggccagtgccaggatacctctcttccccccagagcataacagacacgtgcctgtacatcttcacctctggcaccacgggcctccccaaggctgctcggatcagtcatctgaagatcctgcaatgccagggcttctatcagctgtgtggtgtccaccaggaagatgtgatctacctcgccctcccactctaccacatgtccggttccctgctgggcatcgtgggctgcatgggcattggggccacagtggtgctgaaatccaagttctcggctggtcagttctgggaagattgccagcagcacagggtgacggtgttccagtacattggggagctgtgccgataccttgtcaaccagcccccgagcaaggcagaacgtggccataaggtccggctggcagtgggcagcgggctgcgcccagatacctgggagcgttttgtgcggcgcttcgggcccctgcaggtgctggagacatatggactgacagagggcaacgtggccaccatcaactacacaggacagcggggcgctgtggggcgtgcttcctggctttacaagcatatcttccccttctccttgattcgctatgatgtcaccacaggagagccaattcgggacccccaggggcactgtatggccacatctccaggtgagccagggctgctggtggccccggtaagccagcagtccccattcctgggctatgctggcgggccagagctggcccaggggaagttgctaaaggatgtcttccggcctggggatgttttcttcaacactggggacctgctggtctgcgatgaccaaggttttctccgcttccatgatcgtactggagacaccttcaggtggaagggggagaatgtggccacaaccgaggtggcagaggtcttcgaggccctagattttcttcaggaggtgaacgtctatggagtcactgtgccagggcatgaaggcagggctggaatggcagccctagttctgcgtcccccccacgctttggaccttatgcagctctacacccacgtgtctgagaacttgccaccttatgcccggccccgattcctcaggctccaggagtctttggccaccacagagaccttcaaacagcagaaagttcggatggcaaatgagggcttcgaccccagcaccctgtctgacccactgtacgttctggaccaggctgtaggtgcctacctgcccctcacaactgcccggtacagcgccctcctggcaggaaaccttcgaatctgagaacttccacacctgaggcacctgagagaggaactctgtggggtgggggccgttgcaggtgtactgggctgtcagggatcttttctataccagaactgcggtcactattttgtaataaatgtggctggagctgatccagctgtctctgacctacaaaaaaaaaaaaaaaaaa

SEQ ID NO: 1937 - DNA, 5411 bp, HOMO SAPIENS
ctcgcgcccagcgcagtcgctccgagcggccgcgagcagagccgcccagccctgccagctgcgccgggacgataaggagtcaggccagggcgggatgacactcattgattctaaagcatctttaatctgccaggcggagggggctttgctggtctttcttggactattccagagaggacaactgtcatctgggaagtaacaacgcaggatgccccctggggtggactgccccatggaattctggaccaaggaggagaatcagagcgttgtggttgacttcctgctgcccacaggggtctacctgaacttccctgtgtcccgcaatgccaacctcagcaccatcaagcagctgctgtggcaccgcgcccagtatgagccgctcttccacatgctcagtggccccgaggcctatgtgttcacctgcatcaaccagacagcggagcagcaagagctggaggacgagcaacggcgtctgtgtgacgtgcagcccttcctgcccgtcctgcgcctggtggcccgtgagggcgaccgcgtgaagaagctcatcaactcacagatcagcctcctcatcggcaaaggcctccacgagtttgactccttgtgcgacccagaagtgaacgactttcgcgccaagatgtgccaattctgcgaggaggcggccgcccgccggcagcagctgggctgggaggcctggctgcagtacagtttccccctgcagctggagccctcggctcaaacctgggggcctggtaccctgcggctcccgaaccgggcccttctggtcaacgttaagtttgagggcagcgaggagagcttcaccttccaggtgtccaccaaggacgtgccgctggcgctgatggcctgtgccctgcggaagaaggccacagtgttccggcagccgctggtggagcagccggaagactacacgctgcaggtgaacggcaggcatgagtacctgtatggcagctacccgctctgccagttccagtacatctgcagctgcctgcacagtgggttgacccctcacctgaccatggtccattcctcctccatcctcgccatgcgggatgagcagagcaaccctgccccccaggtccagaaaccgcgtgccaaaccacctcccattcctgcgaagaagccttcctctgtgtccctgtggtccctggagcagccgttccgcatcgagctcatccagggcagcaaagtgaacgccgacgagcggatgaagctggtggtgcaggccgggcttttccacggcaacgagatgctgtgcaagacggtgtccagctcggaggtgagcgtgtgctcggagcccgtgtggaagcagcggctggagttcgacatcaacatctgcgacctgccccgcatggcccgtctctgctttgcgctgtacgccgtgatcgagaaagccaagaaggctcgctccaccaagaagaagtccaagaaggcggactgccccattgcctgggccaacctcatgctgtttgactacaaggaccagcttaagaccggggaacgctgcctctacatgtggccctccgtcccagatgagaagggcgagctgctgaaccccacgggcactgtgcgcagtaaccccaacacggatagcgccgctgccctgctcatctgcctgcccgaggtggccccgcaccccgtgtactaccccgccctggagaagatcttggagctggggcgacacagcgagtgtgtgcatgtcaccgaggaggagcagctgcagctgcgggaaatcctggagcggcgggggtctggggagctgtatgagcacgagaaggacctggtgtggaagctgcggcatgaagtccaggagcacttcccggaggcgctagcccggctgctgctggtcaccaagtggaacaagcatgaggatgtggcccagatgctctacctgctgtgctcctggccggagctgcccgtcctgagcgccctggagctgctagacttcagcttccccgattgccacgtaggctccttcgccatcaagtcgctgcggaaactgacggacgatgagctgttccagtacctgctgcagctggtgcaggtgctcaagtacgagtcctacctggactgcgagctgaccaaattcctgctggaccgggccctggccaaccgcaagatcggccacttccttttctggcacctccgctccgagatgcacgtgccgtcggtggccctgcgcttcggcctcatcctggaggcctactgcaggggcagcacccaccacatgaaggtgctgatgaagcagggggaagcactgagcaaactgaaggccctgaatgacttcgtcaagctgagctctcagaagacccccaagccccagaccaaggagctgatgcacttgtgcatgcggcaggaggcctacctagaggccctctcccacctgcagtccccactcgaccccagcaccctgctggctgaagtctgcgtggagcagtgcaccttcatggactccaagatgaagcccctgtggatcatgtacagcaacgaggaggcaggcagcggcggcagcgtgggcatcatctttaagaacggggatgacctccggcaggacatgctgaccctgcagatgatccagctcatggacgtcctgtggaagcaggaggggctggacctgaggatgaccccctatggctgcctccccaccggggaccgcacaggcctcattgaggtggtactccgttcagacaccatcgccaacatccaactcaacaagagcaacatggcagccacagccgccttcaacaaggatgccctgctcaactggctgaagtccaagaacccgggggaggccctggatcgagccattgaggagttcaccctctcctgtgctggctattgtgtggccacatatgtgctgggcattggcgatcggcacagcgacaacatcatgatccgagagagtgggcagctgttccacattgattttggccactttctggggaatttcaagaccaagtttggaatcaaccgcgagcgtgtcccattcatcctcacctacgactttgtccatgtgattcagcaggggaagactaataatagtgagaaatttgaacggttccggggctactgtgaaagggcctacaccatcctgcggcgccacgggcttctcttcctccacctctttgccctgatgcgggcggcaggcctgcctgagctcagctgctccaaagacatccagtatctcaaggactccctggcactggggaaaacagaggaggaggcactgaagcacttccgagtgaagtttaacgaagccctccgtgagagctggaaaaccaaagtgaactggctggcccacaacgtgtccaaagacaacaggcagtagtggctcctcccagccctgggcccaagaggaggcggctgcgggtcgtggggaccaagcacattggtcctaaaggggctgaagagcctgaactgcacctaacgggaaagaaccgacatggctgccttttgtttacactggttatttatttatgacttgaaatagtttaaggagctaaacagccataaacggaaacgcctccttcatgcagcggcggtgctgggccccccgaggctgcacctggctctcggctgaggattgtcaccccaagtcttccagctggtggatctgggcccagcaaagactgttctcctcccgagggaaccttcttcccaggcctcccgccagactgcctgggtcctggcgcctggcggtcacctggtgcctactgtccgacaggatgccttgatcctcgtgcgacccaccctgtgtatcctccctagactgagttctggcagctccccgaggcagccggggtaccctctagattcagggatgcttgctctccacttttcaagtgggtcttgggtacgagaattccctcatctttctctactgtaaagtgattttgtttgcaggtaagaaaataatagatgactcaccacacctctacggctggggagatcaggcccagccccataaaggagaatctacgctggtcctcaggacgtgttaaagagatctgggcctcatgtagctcaccccggtcacgcatgaaggcaaaagcaggtcagaagcgaatactctgccattatctcaaaaatcttttttttttttttgagatggggtcttcctctgttgcccaggctggagtgcagtggtgcaatcttggctcactgtaacctccgcctcccaggttcaagtgattcttctgcctcagcctcctgagtagctgggattacaggtgtgcaccaccgtacccagctaatttttgtattttagtagagacgggggtttcaccatgttggctgggctggtctcgaactcctgacctcaggtgatccacccgcctgagcctcccaaagtgctgggattacaggcatgagccaccgcgcccggcccactctgccattgtctaagccacctctgaaagcaggttttaacaaaaggatgaggccagaactcttccagaaccatcacctttgggaacctgctgtgagagtgctgaggtaccagaagtgtgagaacgagggggcgtgctgggatctttctctctgactatacttagtttgaaatggtgcaggcttagtcttaagcctccaaaggcctggatttgagcagctttagaaatgcaggttctagggcttctcccagccttcagaagccaactaactctgcagatggggctaggactgtgggcttttagcagcccacaggtgatcctaacatatcaggccatggactcaggacctgcccggtgatgctgttgatttctcaaaggtcttccaaaactcaacagagccagaagtagccgcccgctcagcggctcaggtgccagctctgttctgattcaccaggggtccgtcagtagtcattgccacccgcggggcacctccctggccacacgcctgttcccagcaagtgctgaaactcactagaccgtctgcctgtttcgaaatggggaaagccgtgcgtgcgcgttatttatttaagtgcgcctgtgtgcgcgggtgtgggagcacactttgcaaagccacagcgtttctggttttgggtgtacagtcttgtgtgcctggcgagaagaatattttctatttttttaagtcatttcatgtttctgtctggggaaggcaagttagttaagtatcactgatgtgggttgagaccagcactctgtgaaaccttgaaatgagaagtaaaggcagatgaaaagaaagaaaaagcctttttatgttcttttatgttctcggctcaaaaagaaacaagggagtgtaggtttaaaaccaaaacaggagagaagacaaaccccgctccggctggagttagttagaaccagaactttattgtagcggatacactttctgacctatcatgagtatacacatctgcgaagggaaaccgcgcggcgaca

SEQ ID NO: 1938 - DNA, 2211 bp, HOMO SAPIENS
tcctggcggagccatggctgcgcagcgggctggccgggggtctcctgaacccgggccccgccgccccgaccgcccggccccgccgccggggctgtccccgccgcgtccgtagcgcgtcctgccagggctgaaatctctttaatgatggagggaagcaggcagacgcgagtgtctcggccatacaagatcagcgaatcatcaaaggtataccgctgggccgaccactcaagcacggtgctgcagcggctgaacgagcagcgtctccgcgggctcttctgcgacgtcgtcctggtggccgatgagcagcgtgtgccagcccatcgcaacctgctggccgtgtgcagcgactacttcaactccatgttcaccatcggcatgcgggaagctttccagaaggaggtggagctgatcggcgcctcctacattgggctcaaggccgtggtggacttcctgtacggcggggagctggtgctggatggcggcaacattgactacgtcctggagacggctcacctgctgcagatctggacggtggtagacttctgctgtgagtacctggagcaggaggtgagcgaggacaactacctgtacctgcaggagctggcctccatctacagcctcaagcggcttgatgccttcatcgatggcttcatcctgaaccacttcggcacgctgtcctttacgcccgacttcctgcagaacgtctccatgcagaagctgtgtgtctacctgagcagcagcgaggtgcagcgggagtgtgagcacgacctcttgcaggccgccctgcagtggctgacgcagcagcccgagcgcgaggcccacgcccgccaggtgctggagaacatccacttcccgctcatccccaagaacgacctgctgcaccgcgtcaagccggccgtgtgctcgctgctgcccaaggaggccaactgcgagggcttcatcgaggaggccgtgcgctaccacaacaacctggcggcccagcccgtcatgcagaccaagcgcacggcgctgcgcaccaaccaggagcgcctgctgtttgtgggcggcgaggtctccgagcggtgtctggagctcagtgacgacacctgctacctggacgccaagagcgagcagtgggtcaaagagacgccgctgcccgcccggcggagccaccactgtgtcgcggtgctggggggcttcatcttcatcgccggcggcagcttctcacgggacaacggaggggatgcggcctccaatcttctttataggtatgacccccgctgtaaacagtggatcaaggtggcctccatgaaccagcgccgtgtggatttctaccttgcctccatcgaagacatgctggtggccatcggcggccggaatgagaacggagcgctctcttcagtagagacgtacagtcccaagactgactcctggtcctatgtggccggcttgccaaggttcacgtacggccacgcgggcaccatctacaaagacttcgtgtacatctcggggggccacgactaccaaattggcccctaccgcaagaacctgctatgctacgaccaccggacagacgtgtgggaggagcggcggcccatgaccacggcgcgcggctggcacagcatgtgcagcctgggtgacagcatctactccatcgggggcagcgatgacaacatcgagtccatggagcgcttcgacgtgctgggcgtggaggcctacagcccgcagtgcaaccagtggacccgcgtggcgccgctgctgcacgccaacagcgagtcgggcgtggcagtgtgggagggccgcatctacatcctgggcggctacagctgggagaacactgccttctccaagaccgtgcaggtgtacgaccgcgaggccgacaagtggagcaggggcgtcgacctgcccaaggccatcgctggcgggtccgcctgtgtctgcgccctggagccacggccagaggacaagaagaagaaaggcaaaggcaagaggcaccaggaccggggccagtgaccctagctgcgcctcttgggaccatcctcaccgtcacctcccagggctctgtagaccagcagcaacttcttagtattccggaaacattatgtacaacttagcagctttttttacttttatgattcttggtatttctatgatatcacagtaaccaattaaatactatctgtaactttaaaaaaaaaaaaaaaaaaaaaaaaaaaaaaaaaaaaaaaaaaa

SEQ ID NO: 1939 - DNA, 3284 bp, HOMO SAPIENS
gagcggtgccgcaccggccgcgggcgcagggagtattatgggctgtgggtgccgctgagcaagatggagctgtctgcagtgggcgagcgggtcttcgcggccgaatccatcatcaaacggcggatccgaaagggacgcatcgagtacctggtgaaatggaaggggtgggcgatcaagtacagcacttgggagcccgaggagaacatcctggactcgcggctcattgcagccttcgaacaaaaggagagggagcgtgagctgtatgggcccaagaagaggggacccaaacccaaaactttcctcctgaaggcgcgggcccaggccgaggccctccgcatcagtgatgtgcatttctctgtcaagccgagcgccagtgcctcctcgcccaagctgcactccagcgcagccgtgcaccggctcaagaaggacatccgccgctgccaccgtatgtcccgccgtcccctgccccgcccggacccgcaggggggcagccccggactgcgcccgcccatttcgcccttctcggagacggtgcgcatcatcaaccgcaaggtgaagccgcgggagcccaagcggaaccgcatcatcctgaacctgaaggtgatcgacaagggcgctggcggcgggggcgccgggcagggggccggggcgctggcccgccccaaagtcccctcgcggaaccgcgttataggcaagagcaagaagttcagcgagagcgtcctgcgtacacagatccgccacatgaagttcggcgcctttgcgctgtacaagcctccgcccgcccccctggtagccccgtcccccggcaaggctgaggcctcagccccgggccctgggctacttctggccgcccccgccgccccctacgacgcccgcagctctggctcctccggctgcccctcgcctacaccacagtcctctgaccccgacgacacgccccccaagctcctccccgagaccgtgagcccatccgcccccagctggcgcgagccggaggtgctcgacctgtccctccctcccgagtcggcagccaccagcaagcgggcaccgcctgaggtcacagctgctgccggcccggcacctcccacggcccctgagcccgccggtgcctcctccgagcccgaggctggggactggcgccccgagatgtcaccctgctccaatgtggtcgtcaccgatgtcaccagcaacctcctgacggtcacaatcaaggaattctgcaaccctgaggatttcgagaaggtggctgctggggtagcaggcgccgctgggggcggtggcagcattggggcgagcaagtgagggggctccaccaaggaggggggcttgggggggccctcctgcccgaagtcatactcttgctcccaccccacccttgcccccagccctctctccctgtgctttgcttgtctcaaatggctcggtgttgacccagggatggggctgggtagttggggtcccagaaagccgggggtaggggccaccctggaatggggcaggggaagggcacaccccctgcccatgcatggtagcccactgggtggtttctggaaagccctagaaactagggttcctctgccccttccacatcccacctgtctctctagcttgcttcctgctctcctgtgcggcgtctgatttctcggtgctaacctggcagctgtggggcccttaggagccccccaccgagggtggacacagtccctttccttcctgcagatgcctaggcaggaggagggcttcctgcctgtttggcaaagtcccaggcagaggccaaggatgaggcctgactcggctcctccctccacatcagccagggcatcagaagttgggccagggcggggtcttccctgctcgattttggacgaggcctaagtagaccccctatgccctgccccagccctggctctttcctaaccccctcaacggtgggaggaactggcagagggtgcgcctggccacagcctccccgcatctaaaggccccttcagttcttgaccaaaggtgctacgagaacctgccgtggaaacttccagttgtgcgtctgccccactcgctgtgtttgtccgtgggttcatacatgcattgggtgctaggccccaggctgccgggtggcaccctttacagttcctttgaacaggggcattgaaggcctggactgcctctcgcctcagtaggcctggggaccaggcttgggtctggaggtttgctgtggaagtcaccaggcctcccctcctggcccaggtgtgctgggggcaccgtgccccccacccccctgccctcctcagggtggtcagcccaacctgtcggaccttcacttcacatcatggtggggaccgagatagagagggagaccccattccaagctccctcttcctcccggtgtttggggaggatgctgaagaatccattcccgagggcctcccggcttgtcccagcccctcttttgcttctgaccacggaggctttctcacagcccagcctgcctgaagcaaaggaggctcccgtgtcctgggcagcttctgtttccctctgctgcctgggagctgaggcacccgtgccagtggcagaggccacagccccagccttaggccaggccctgggagggcaggcaggcaaaggggagaccagagggtctgtgttctccaggagaatgagggtgttggtcccagaattgggaccggggccccgctggccagccctgggccacttcccgggtctccattgtgcgtgggtggcgtgttccaggcgtggctggagctggcttcctggctgtgctgccatgggcccctccctcagaagcacgttggcaggaggccgatcagaaccctagcgcctttggtcctaagaatgggaggctgccttccttcccaatctccctgccagggcccacagcgtggccctagccctcccctccccgggatgtagaacggggaccctcgcagggttggggcgggggctgatactcctcggcccctccctaccctgccctgtgtgttggctttgtggccgtccaagtgccaattggcttttcgcccaaataagggctggtatttctcctctgtccttggaggtgatttccccctgaccccctcccccaggtgagtgaccacctgggtgccagttacaggtgtttccagagaccatagaaatgtgttttcctgagagttcgtgtcattcgtgacttttttgtaaagaagttgtgttttcagaggtgattttatgacaggaaagtgaaagaattagttttgcaaaaaaacaaaaacaaaaaaaaaaaaaaaaaa

SEQ ID NO: 1940 - DNA, 4316 bp, HOMO SAPIENS
cgtcatgttagggtgaagcagaggacctcagtgctgaacatgctaaggaggttggacaaaatcaggttcagaggtcacaagagagatgacttcctcgatctagcggagtctccaaatgcctcggacaccgaatgcagcgacgaaatccccctgaaggtaccgcggacctcgccccgggacagcgaggagctgagggaccctgctggtccagggaccctcatcatggccacaggagtccaggactttaaccggacagagtttgatcgactgaatgagatcaaaggtcacctggaaattgccttattggaaaaacatttcttacaggaggagctccggaagctgcgagaagaaaccaacgcggagatgctgcggcaggagctggaccgcgagcggcagcggcggatggagctggagcagaaggtgcaggaggtgctgaaggccagaaccgaggagcagatggctcagcagcccccaaaagggcaggcccaggccagcaatggagcagagcgccggagccaggggctgtcctcgcgcctgcagaagtggttctacgagcggttcggggagtacgtggaggacttccggttccagcccgaggagaacactgtggagacagaggaacccctgagcgcccgcaggttaactgaaaatatgagacggctcaagcgcggtgccaagccggtcactaactttgtgaagaacctctctgccttatccgactggtactccgtctacacgtctgccattgccttcaccgtgtacatgaatgccgtgtggcatggctgggccatcccattgttcttatttctagcaattctgaggttatccctcaattacctcatcgccagggggtggcggatacagtggagcatcgtgcccgaagtgtctgagcccgtggaacctccaaaggaagacctgactgtgtctgagaagttccagctggtgctggacgtcgcccagaaagcccagaaccttttcgggaagatggctgacatcctggagaagatcaagaacttgttcatgtgggtccagccggagatcacacagaagctgtatgtggcgctctgggctgccttcctggcctcctgcttcttcccctaccgcctggtggggcttgccgtgggactctatgctggtatcaagttcttcctcattgatttcatctttaaacgctgcccgaggctgcgcgccaagtacgacacgccctatatcatctggaggagtctccccaccgacccgcagctcaaggagcgctccagcgccgcagtctcacgcaggctgcagacgacctcgtcacggagctacgtacccagcgcaccggccggcctgggtaaagaggaggacgccggtcgcttccacagcaccaagaagggcaatttccacgagatcttcaatctgacagaaaacgagcgtccgctggcggtgtgcgagaatggctggcgctgctgcctcatcaacagggaccggaagatgcccacggactacatcaggaacggggtgctctacgtcacggagaattacttgtgcttcgaaagctccaaatctgggtcctcaaagaggaacaaagtcatcaagctagtggacatcacggacatccagaagtacaaggtcctgtctgtcctcccaggctcaggcatggggattgccgtgtcgacgccatccacccagaaaccgctcgtgtttggtgccatggtgcacagggatgaggccttcgagaccattctcagccagtacatcaagatcacctcagcggcagcgtctggcggggacagctagtattgacttgcccaggacgttgctggaattttctttttctttttctttttctttttttttttttacgatttggtagtggaaacaattggacatcctcatgagcttttgcaataattctcctggacctgtggttctattgtgttgacctctgcgttttatcgaccaagaaggggccagggctcacagggacgggggtgcccctctcccacagggcacgtcaggtgcctctgagggccacccgcagactgggggagggggcagaggccctcgggggcccgtggagaagacacacaggacccctggccctgcccttctccgttccagcctggacagagaaacctctccagccaccccaagaggttctcgcaaccttgtgtcccgctctccagaggccagaagctcgtccaccaccaaagccatagctgaagagtgcggggcccttcctcctggggacagaaagatgtcgtcaaggagggacatgggggcctttcaccaaccaccgagaaacgggcctggcggccctccttcctcttacatgagaccctcctgtggcatttgcccttggtgccgggctggggccgggcgcagtgaccctgcctgcgctccacactcgctccacgggaacagagagggtgagaagggcccacccctcgcctgccctcagtgtctttggtggcaccttccttgctggcctccagggcgctcagcaccgcgtctgtaagggcctgcctgctgctctcggcctgacacgccggccaggaggtctgtagctggggaccagtaagggcacaggatggtgcaggtaaaagcacatctttctcacactttgctctttggaaggcccaggagaacatccgcgaaggctgttggaggtgctccgagcactgtggcatgtctggcacatggcccccaggctgcggttgcctgggttggttgggggaggaagtggggaggagtgttccgggaccatggtggcccaggctgcagccgcctttgggccatccgagaggctctggcagcccctgtgctttagggagcaaccgtgagccgagcccagaggcctgggcctgcactgcctgcagccgacatgcgacagcgttccctcccccgcgtgcctagccggtgccggtccgggcacagacccccccagcccccgccctgccccagggaagcctgggcttcccgggaacaaggtggcatttgtggagggagcgcccgcaggcctggtctgctggggccgcctgcgctgggctgaagggagggaaaggcggcttgggcctcctggaaggaggtggccaccccgcgggcctgcgtgtctgctggggcggatcccgcagctccctcagcttgtcctgagtcccttgggtgtcgttgagattgttgttttttgaagaaacagaagattctattttttacagcgagcaagctggttttcttatttttgtatcctttttcagatgtaatttttatctttgctccgatcctcatttgctggtgtgggtgagggatccggcggcatgggctggtttcacccccttcacgaggggccgcagagtcacacgctggtgccgggggtgctttggggggagctgcgccgatcaccagattaagcacatgtcctatcccaggcggtggagcggagcccccgtggctctggactgcgcggacgttggcgtcaggatgaccacacggcggcctttcccgaatggggacagaacccgctctgagccgtgggtctggctcctgtaggggactggctctcttggtgcaccaggggagggggacatatcccagtgaaccccaccttggcgcctgaggcaacacagggtgggcactgacccacccccaggggcggctgcagaggcagtgcccgcagacaatggccacacctctctccccagggcccggcagtgcccaaggatgggtccggggcctcggggccaatgagcgcctcttcctaggtgctgggattcagtccccaaacacagcgggaggggtccctggggcagatggggctttaccagcgtcgggtggtttagttcgagtcccttttgtggagaaagggagatgaaaactgaccacgtgccaggtgtggccgaagcccccagggagggccacattcggggagcggggggtcgggggagggccaccgactggctctgctgccagcacaggcccctccctggaagtcctcgggagcggagcgcggatcggcacgggctctgggctccccgtggagagaagctgtagtttttaccaaattgtgtacatctgggcagatgtttaatttctgtgactaatcactgaactagacgaatgttaaattttttatgtctgaagcctgagtctattttggatctgtaaataatcattgccagtgtgacttttgttcaacaaaaggattgtactgtattaagaaccgatgaaaaaaattctcctgtaacatttttttaagaaaactttgtttgtttaaagaaaaagtattgtataaattataatttttatttaaataaacctaaaatgctttgtgctaaggctca

SEQ ID NO: 1941 - DNA, 12750 bp, HOMO SAPIENS
gcgactccagctccgcggcgccctcgccgggtgcgtgccgctcgcgcgcccgccagccaggctctccgcgcccgccgcccgcgccgcgctggcccgggctctcccgcccgcgcttcatggctgcacacgagtgggactggttccaacgcgaggagctcatcgggcagattagcgacatccgagtgcagaacctgcaagttgagagggaaaatgtgcagaagaggacctttacacgatggataaatctacatctagaaaagtgcaacccacctctagaagttaaagatttattcgtcgatatacaagatggcaaaatcctaatggctttgttagaagtcctgtctgggcggaatctgctgcacgaatacaaatcctcgtcgcatcgtatttttcggttgaacaacatagcgaaagcacttaagtttttggaagatagcaatgtaaaactggttagcattgatgcagcagaaatagcagatggcaacccttctttggttcttgggctgatatggaacataatcctcttcttccagattaaggagctcacaggcaacctcagcagaaactctccatcttccagcttgtcccctggctcagggggcacagactcagactcatccttcccacccacacccactgcagagaggagcgtggcaatatcggtgaaagaccagaggaaggctatcaaggccctgttggcgtgggtgcagaggaaaacgagaaagtatggcgtggcggtgcaggactttgcgggcagttggaggagtgggctggctttcctggcggtgatcaaggccattgaccccagcctggtggacatgaaacaggccctggaaaattccacacgagaaaatctagagaaggctttcagcatcgcacaggatgccctgcacatccccaggctcctggagccagaagacatcatggttgacacaccagacgagcagtctatcatgacttacgtggcacagtttctagaacgttttccggagttggaagccgaagatattttcgattcagataaagaagttcctatcgaatccacttttgttcgcatcaaagaaactccttctgaacaggagagcaaagtcttcgttctgactgaaaatggggagcgtacctacactgttaaccatgaaaccagccacccaccaccctccaaagtctttgtctgtgacaagcccgagagcatgaaggaattccgcctggatggtgtttccagccatgcgctgtcagacagctccaccgagttcatgcaccagattattgaccaggtcctgcaagggggcccaggtaagaccagcgacatcagtgagccatctccagaatcctccattttatcatccagaaaggagaacgggaggtccaactctttgccgatcaagaaaacagttcactttgaggctgacacctacaaggatcctttctgcagtaagaacctgtccctttgctttgaagggagcccaagagtggcaaaggaatcattgaggcaggatggacatgtcttggcagttgaggttgctgaggaaaaggaacagaaacaggaatcctcgaagattccagaatcctcctctgacaaggtcgctggtgacatttttttggtggagggcacaaacaataattctcagtcttcttcctgtaatggtgctttagagagtacagcccgccacgatgaagaaagtcactctctttcacccccaggagaaaatactgtgatggccgattccttccagatcaaggttaacctgatgactgtagaagctttagaggagggagactattttgaagccatcccattaaaagcctcaaaatttaacagcgacctaatagattttgcttctaccagccaggctttcaacaaagttccttcacctcatgagacaaaacctgacgaggatgctgaggcttttgagaatcatgctgaaaaactaggtaaaaggagtattaaatctgctcacaaaaagaaggattcgccagagcctcaagttaagatggacaaacatgaacctcatcaggactccggagaagaagctgaaggctgtccttcagccccagaagagacaccagtggataaaaagccagaggtgcatgaaaaggccaagagaaagtccacccgtcctcattatgaggaagagggagaagacgatgacctccagggtgtgggcgaggaattatcttccagccccccaagcagctgtgtcagcttggagacccttgggagtcacagcgaagaaggcctggatttcaagccctccccacccctctcaaaggtttccgtcattccccacgacctcttctatttcccacactatgaggttcccctggctgcagttttggaggcttatgtagaagacccggaggatctaaaaaatgaagaaatggatctcgaagagccagagggctatatgccagacctggactccagggaggaggaggccgatggctctcagagcagctccagttcctcggtgccaggagagagcctccccagtgccagcgaccaggtgctgtatctcagcaggggtggtgtgggtaccacaccagcctcagaacccgctccactggccccccatgaggaccaccagcaaagggagaccaaagagaatgaccccatggacagccatcagtcccaggaatccccaaacctggaaaacatagcaaaccccctagaagaaaatgtaacgaaagaatcaatcagtagtaaaaaaaaggaaaaaaggaaacatgtggaccacgtagaaagttcactatttgtagcaccaggaagtgttcaatcctcagatgacctagaagaagacagtagcgactacagcattccttccaggactagtcacagtgactccagcatttaccttcgacgacatactcataggtcttcggaatcggatcattttagctatgttcagttgaggaacgcagcagatctggatgacagaagaaaccgaatattaaccaggaaggccaacagctcaggagaagccatgtcactggggagccacagcccgcagagtgactccctgacacagcttgtccagcagccggatatgatgtattttattctcttcctgtggctcctggtgtactgcttgctgctcttcccacaactggatgttagcaggctctgatacgtgtgtctggataataaaaaagacaggaccctgaccaggggcggggttacttcattttattttgggttctgggtggggcacttctacagacagttgaggacctccgaggaaacttagaccccctttctcgctattgtggtttttttttttttttcaggtttccttttttttctggacaacctgagcatgcttttttctttggctgtgtactcaaaactcaggcatgcagctggatccgtaggtggggttttgtccttgtgtgccttgctgggttggatagggagcattgttagtgatcattagcccgcctggatcttagcacaccccacattgcaggttcacacgctggatgaacttgagtttcttacctctcagatgaagggctgcttaatgagaaagagggtgggcaccccaggccaagccccagctggggagagagctgccacgttttcctccaagcgtgggtgtttgagagaaggtgctggggtccatgcacctgtcgcagtccggtaactggttgcattcactaggggaaatccgagcagccagctctgtgtaagcacatccaggaatggcagaatccagggaggaaggtgaaagctgtgttgagagccactgtgtgctctttttcaccctgttttttttgttgtttttttgttttgttttttgtttgaggggagataacacttgaaattcagttttccattgattggattgagatagaaccatgattttcaaaccagatcgccagggcccagcagggccatataaaagccatgaggagtggctgggctggaatcagctcccagcagtgctggagctgggtggtggggtagcttcctgcccactaaagctttggtgcacacctccctcagaatgcatgtcttggaacgggcattctttgtggtcacttgtaatgggtttcttgaagaggctttctggacagcactccgggagcaggccagcacaggaggtttgtgaaagaagagaggcatctctagcacccctgcccccagtcttcctcagccccaggctccctctgctctctcctccctgccaagactcaggtccgtggtgagtctctgcattggttcctcctccccttgctctccccttcagaaagcatgtaccaggcaacccttataaaatcacaaatgagtcaggaggggactcagtgagcatcttgtctagctggacccagagagacagagcagcttgaccaagatcatatagccgaccaggggcagacttgcagtgagcacacaggcacctgatgccctgtccagagctgtcaccccttgtaggaaacttccactgggcacaccaatgtcctgagaaaaagataaaatgactagattaaaatgtccacattcaagcaaaaccaaaaagtttagaccaactatcgacatttgttttgttcttgtatttttcccatgaggaattcttactcaccttcaagctcatccccaattccttctgaaatacccttgacagctgcaacagcttgtcatttgacataccagcgtcgctcttactccaggaatcacgtttctttctttgctagccaaggacttgctcatttcaagcagtgggtttcaagtttacagaattccagcatggccagaagaatttacatagcacatctgagtcgatgacagccaaaatctggcctctaaaccagtctgattatagtctgtctcccctcctgaaagaatttcagccttccaaccagaaagctgctgggagcttggagtgattccatctggaaggccaagagccccatggaaaatgagctaattaatgagctccctggcatcaatgaaagctcaaaggtacagataataaagattatgtgatagtttataactctgggcaccatgcagtccttgcctaaattagatgctcgaagagcctgggaagagccaacccaaatgtgaatcatttcattttatgggtctagaccttgttcagaaaaacctctgcaagatacttctctcacctattacaacttgtaatattgtttaaaacatctactggcaagatgcctgaaagtcatttggttcaggttggcagtcaactgatattttgcaaaggaaaaaaaaatctcatttgagtataggcttctatggaagaagctggatatagaaaatggatgtggaagtctgcaggacaaaccaccccattgcttgtaaattttttttaaattaaaagaaatacaataaggcttttaacaagaactagcagtcccctaagtctcgctgcttagaagtaaccactttcaactctcttatgtttgcatttctacataacgtgcttacactttattttttaatttagaaacatctactggcttgctgtcacagtagaggaggatttcactcttaccataccgtgctttggttttccagtatagctagatcacatcatttagtacatttctattaggtgttgacattacctggagcacttaaggattgttgactcccaagcccagcagtgtgttatggttacatgtcctttctcctccaaatgtccccattaatttgctattctctctctttactttttttttttttttggtgtggcacattctttaataacttcctgaggaagagaacatgggaagtaaatatggttgtaaatattttgagatttttgcatgacttaagatgtctgtattctgcccttaacagaaatgtggctgagcatagaatgacaggtggaaaataataccctcccctagcccctcccaagcgtgctggttgagatttctgatgccattctgattcccgtacctttatatgtgacttaggtttttttatccacccttcctggaaacatttaagatctctttattcttggtgttctgaactgtcatgatggtgttgtatcccgggtgttaaaccttgtgctgggccttcatgggaaatttcttaaattttcttgtgattatttacattctttctttctggaccacctattatttcaatgttggaccctcccctacacccaggctgatgctctaatattttttatcttttctatttttcgtctatgtttctgatctgctttcaggaagaattattcatttttatcttcccaatctgaatgttttattgaatttttattttccaagttaataaaacctttggttattatcctgtctttgttttacagtgtcctgctcttgatgcgtggatgcagattttgtctctctgtggacgttaatgattgtggtctgaggggaagtcttttctgctccctgtgttgccctcattttctctgagttctctttattttggtggtctcagtctctatctttcacgttgtgaatttttctcaaatatatggtgatcctatggatctgttcatgttttaagagtgaggcatccaaaagctgattggaagttgtgtgtgccaactggtgagcttttccactagggtcaccaggtgggcacctggactcatcattggagaacactgcctgtcagtatttgcacgtgttttctctggggctcattctgtttcttgagagatattcccactactctccttcctgggaaacgggcatacacagggcttttagcctatgctgagtactcatgtggtttcaaaaatggtgtcccatctgggcagaagtccccatgagcacttggcttgactggcaaaggacaccttttgccccttcctccagacatacccagctctgagcttggacaatgctcgaggaacaatgaaaaggctagattttaactcctaattgccctctttagccaagtgcctctgtgcaatgcacaactgtaggaccatatccagagaccctggtctatactcagtgtgcccgagtcctgaccgctgagcaggcagcctcatcacccgtgagtatttagactttcattaagttgcttcaacctttgctgtgcctggtgtccctgagttggagctgctctgatttctccatggagtaggagcacagtggtcatctggctgcatgggaaggacaggggacctcagagccaataaatgccctggtcttcagccccatgtctcaccccatccctcctattccaatccccaagcctctcctggaggccacagggcatctctgctgaccactctgtggcctcccctctgcaggcatgtggttttaggatccccctccctgctcacttttccatcagttccattcctgcataaataggttgctagctcttgcttactgttctcttctgtattctgtgttcatggttgtattaatataactttcattcctctgctcctattttcatggggtttcatgagggaagaaacaggctcatgtgttcagtataccatcttgatccataaaccccatttgagttatctcacaggttgcttagggggcttgctgctctgactggtttgtgaacgtgccctgagtccagctgggactgcagcaacatccatcctgttgagctgtggtctgctaagtgattttgtgtaatgctgtgccaagtgcaggagagggatacatagcatggctaagctctgcttgaatgccatgattagttattaccttccttccttccccctggttttgctgcctattgtcagtaaatgatcttagatctcctgcctccccaaagatatagtctatgtggtggtctgggttctaggttttctttaccacccttgcttcacttaagaaacagaaaactggctaggcacagtagtggctcacacctataatcccagccctttgggaggccaaggcaggaggatcgcttgaggccaggaattcaagaccagcctgcacaacatagcaagactccatctctacaaaaagttaaatttaaattagtggtggcatacacttatagtcccagctactcaggaggatgaggcaggagaattgtttgagcccatgactttgaggttactgtgagctatgatcctgctattttactccacctgagtgacagagcgagacgctgtctcaaaaataaagaaacaagtagtccacacaggtgtttgccagcaaacaaacagcgcggattctctgttgaacgtggccaacattgcctcgtcgaagtttgtatcttgccatagttgatgatcaggtggtcggggcttcctggtcagacctgacctttgtggggagatgttctcccaccaaggctcagaagcaggacactcttgctgcccctcgggcagccacccagaacatgggcgtctccatttctgaggttcagcatagttccccccaccctcttcccatgcagtgcatgcctgctctttatcaggatggaacagagggaaggcagaggcactgggggcagcctgtgttgttgatctctgtaagtcacagactgttcgaaaacctcaggaattatgtaagcgttcagtgcctcatttaagagatgaaaaactgaagattagaaagaggaaacgactagtcgccctgctagttgatgacctccagatagccatcttcattcccagttaagtttactacaaaaccacagcctcagctgctgaagctaacctccctacccaccatcgctagggactcagaacaccatggagctcatctctccaacaaaagtcagaattagcaagtacagatgtgtcttacgaaaatgtcagaatccatcatggctgctttggtgaggagctgttctccttccgtggtcatgccattggaaggcagttgtatgacaagaatgctttcacatgagctccgattttcttaactctccagaaggacttcagaagcctctggagttttgagacacggcctctctctcccttctgcttggagacaccttcctgggggtctccactgcattccccgccggtattcctctgtggagccttgcgccctcaggtcccagaaatgggctgtgtgggagcttccagtcagcctggtatctcgggaccttctcagccaggaaatgagactgcacaaagccctgtgaggcccagctgtgttatttctccttccccgacattgcataatcactgctgacacagcatttggggaagatttaacgtcttgggccagcagctgccatctggaaccatcaccacatagcaggttgttctgtcccatccaactgatgagggggctgccctaatgacaaggtccaggacctgggttgggtggtggaaggctgggagctggagtgggcattattgtgcttctgtgctgaaaattgctatggctcttttcccctaacagccagcgtgggagaaccaaacatgagacacaagcatccccttgagctccacagatcttgcgccttgctctcatcaggcatttccttggaaaacagcagtcagcagctcatggaagtgagcccggtgcacagactttgcatggactttgcacaggttccatttccatcgtgtgcagacacctgtatctttgggctccacgtgagcacctgccctcttcactctgattttttttttaagagacagcatcttactctgtcaccgaggctggagtacagtggtgtgatcacagctcactgcagcctgaaactcctgggctcaggcaatcctcctgcctcagcctcccaagtagctggtagtacaggtgcatgccaccacgcccacctaatttttttatcttttatagatacaggtctcactgttgctcaggctggtctcgaactcctggcctcaagtgatcctcctgccttggcctaccaaaatgctgggattataggcatgaaccactgtgcctggccttcactctgatttttcttaagagtcctacaggaccttcaggtcttgtcacttctctaccattgtgtgtgagacagggcatggggtgagcttggtcaggtgtgggtcaaaagcctggagactcagagctgctggttccccaagagcccacaaaagttatcagagtttctgagctgagtgttctgcagttgccagaccccacaatgctgggaatactggcttctttgtgtttagaacttgttctgagaaccttgatgagaacacatcaagcaagcagttcctcccagccagggctggagcaacatgccaaaaaacattcttgtctatgggaaaaagacaaccagtattttgtactgtttgaccaagttgtttttaaatatacacatgcctcaacaatccacggcctcaatcgcactgctaatttgtttaaatccctgacactcagatgtcaagaatagcttcatctagcagtgttctctttaaaggaacccttttttttgttttcattttaatcactgccttcttctctgggaggtattgtgggctagagaaagaagtcaggtttgggagtcagccagatttagattggagtcccagctctgtcaccagatctctgggtgatcttggcaaactaacttctgagcttctgtgcattataggcattcagcacatatttgttggatgaaaaatacttttcttgaaagtttatgaagttgtaggatgcccagcagcccccttttctctatttccttcctcttgaagcaagcgttgactatacctctttccctaacccttagtgtaccatagcttcttccaacctctctccaatccattacttttttctgagctaccctgtctcaaatctaactcaggcctttttgcaagaggaagtttaagccattgtttactcattaactcacttgacccttagaacaatcgtgggaggtgtttatttcggaaaggaagctaaagcacaggacagaaaaataaggtcatagcgtgaactagtaagtagcagaactgggaacataggactgttattttcaaacactctaaacttcactgcagttgcaaatttgcaaccaaaatggccgccttgaaagggtcttttgcagtaaaatctcagtgtccaacatcaaagacagttcttcagggcctccaattaactatacatcctgcccccagctgctcatctctgcacctctaacacgtacttcacagagtaggaaattgggctttctccttcaaaaagaaaagtagagaaggcctgagggcagtgtaattaaaatggagaagtagagaccacgaattacttggatgaattcataactggttggtctctgaggcagggattattatttttcctgtattttaagcttaaaagtagtgatttttgcattgttacaaaaaacaaaatagcaaaatatcatttgatacttgtattctgtttgcaatagctaccacttcctttagccccagcaaaaatcaataggtgtgtattctctacaagcccatgctgtgccagaatgccagtattgctaaatgtcatgcaaggatttagacacttttttaaaggaaactctgggagtgcctgttgtctggagagttgacattgtccaaagcaggccaacactggtatgggtatggagaacccacgtcctagctgtggctcacctgcagatgccttgaatttacctctctgggttggaagtgggaagacttcttttaaaagtcctttctaagtttaaaaatccaaaggttacgaaggtagtttttatttatctcaataagtggcctatttgcttaaagcaagtgtacctctgtatatcagcccaaagcttagggcagtgcttcttggctttagtatctgagaaaggtgcctttgggaagagtttggtcagacagaaggtagtctgaatcttaaaggtttcagatgaatgtttgaagtagaacctgggaaatctgcttcctagggctgttagaaggaaattggtctccttaaattacgtcagcatctgaggcagtttcctaagggaatttcttttaaattcaaaagttcaactgcaggaataaatagctgtacaggactagatcttcccatccctcatcttttccccttccccgagtaacgactcaaaaaggcttctgaaattctactcagaatcggagccgtttgcattccaacaaggatcccttaagccaaatgctggtgtgtttgtgtagaatgtccctggggtaggggcggtagctgtggggagggaatgtggtgcaggggacacctgccctctgcccttgaaattgcaccataagatgctgcctatgtcactcacagtggtgctgatactatccgccaaagacaaattgtgaacacggaaaaatggtcgttccctactgtacatcctcaggacagacttaactaaacttggagacaggagattgttcagaccatattgtagtgggtggtgatcattgttttattttgggggagtctggtctattgagcagattgaatgtttccttattgtgcagggcttaattgactatgtctgaaagtttttactgagagctctaagaaaactattgaggaaaatgaaatgttattttgtagtacaaggattatttttgtctatttaggatatacatagctgtagctttgtaaaaaaaaagatctttataaacaatatatgaatgtgccgtcttatttattgattactgtaaattaagatataaatggctatttgaataatttatacctgtgggaattaactggagtatttgttatttgactgttttctattaaggaatattaggcttggtgctatgatgaatgatcttgtaaaatcatgtgtattcttaagaaaatttttgaatataaatttcttgaactgac

SEQ ID NO: 1942 - DNA, 374 bp, HOMO SAPIENS
  misc_feature (222)..(222): n is a, c, g, or t
  misc_feature (240)..(240): n is a, c, g, or t
gaccctgtctaaaaactatatatatatacgtgtatatatatatgtgtgtatatatatatacgtgtatatatgtgtgtatatatatatacgtgtatatatatatgatgttttctattttattttattttatttttgcaccttttgtactcctcctggagttcatcctgacagacagaggtttgtctggagccagagctcacaaatagttggaactgccctaangatgccattttgttcttnaatataactagcaaatattactcaaagctgtgcacgatccccaaaccctggtccccaataatttgaataatctgaatatgcaagttaaggtattgagatgggaaccctcctgtgtggtatatcttgctcttatc

SEQ ID NO: 1943 - DNA, 3871 bp, HOMO SAPIENS
ctgcagcctccgcagaggcgattggctgaagctaccggccgcgtggggcgggactcggttgccagggagcggcgcgggagccctgaggggactgcggcggctgcgcggaggagcgaggcacttgctggggtcggggctgcgcgacggcgcaggggctgcggggagcgccgcgcaggccgtgcagttcctagcgaggaggcgccgccgccattgccgctctctcggtgagcgcagccccgctctccgggccgggccttcgcgggccaccggcgccatgggccagtgcggcatcacctcctccaagaccgtgctggtctttctcaacctcatcttctggggggcagctggcattttatgctatgtgggagcctatgtcttcatcacttatgatgactatgaccacttctttgaagatgtgtacacgctcatccctgctgtagtgatcatagctgtaggagccctgcttttcatcattgggctaattggctgctgtgccacaatccgggaaagtcgctgtggacttgccacgtttgtcatcatcctgctcttggtttttgtcacagaagttgttgtagtggttttgggatatgtttacagagcaaaggtggaaaatgaggttgatcgcagcattcagaaagtgtataagacctacaatggaaccaaccctgatgctgctagccgggctattgattatgtacagagacagctgcattgttgtggaattcacaactactcagactgggaaaatacagattggttcaaagaaaccaaaaaccagagtgtccctcttagctgctgcagagagactgccagcaattgtaatggcagcctggcccacccttccgacctctatgctgaggggtgtgaggctctagtagtgaagaagctacaagaaatcatgatgcatgtgatctgggccgcactggcatttgcagctattcagctgctgggcatgctgtgtgcttgcatcgtgttgtgcagaaggagtagagatcctgcttacgagctcctcatcactggcggaacctatgcatagttgacaactcaagcctgagctttttggtcttgttctgatttggaaggtgaattgagcaggtctgctgctgttggcctctggagttcatttagttaaagcacatgtacactggtgttggacagagcagcttggcttttcatgtgcccacctacttacctactacctgcgactttctttttccttgttctagctgactcttcatgcccctaagattttaagtacgatggtgaacgttctaatttcagaaccaattgcgagtcatgtagtgtggtagaattaaaggaggacacgagcctgcttctgttacctccaagtggtaacaggactgatgccgaaatgtcaccaggtcctttcagtcttcacagtggagaactcttggccaaaggtttttgcggggaggaggaggaaaccagctttctggttaaggttaacaccagatggtgcccctcattggtgtccttttaaaaaatatttactgtagtccaataagatagcagctgtacaaaatgactaaaatagattgtaggatcatatggcgtatatcttggttcatcttcaaaatcagagactgagctttgaaactagtggtttttaatcaaagttggctttataggaggagtataatgtatgcactactgttttaaaagaattagtgtgagtgtgtttttgtatgaatgagcccattcatggtaagtcttaagcttgttggaaataatgtacccatgtagactagcaaaatagtatgtagatgtgatctcagttgtaaatagaaaaatctaattcaataaactctgtatcagcccccaacatattatttttcattatttgggggatatttcagttccagagcagcagtatcatgttttctttgttggtgctgtctatagttcatcatggtttacgtgtgttttcgttatagctgttgccagattctaaagggcttgatattcaaaaaaccacagatgctttcagtccagtatatcctagaaatatagagctctactttgtgcaatgcactggggatacagtggcgatactgtccttgtcttcaaggagttcggagtcctagtataggagacatacataggagaagataattttcacactgcagtggttgtagtaatagaatgggagtccaaaggggagttccggagaggtcaggggtgacttcctggaggagatgcccaagcttggaggctggataggctttgttgaaagatggtacacaagagtgtgaaacaaaattgtgtgtgcagggagcttaaaatacaaggctggggaaagaagttggagaagcaggaaagcccaggccctctagtgtcttacggaacatcctgtggaggtgagagctgacttgtaggtggaagcagctctttggaggtttgatttggaaggtgaactgagaagaaggtggtgatgcaagccggccgtgctgaagccaggatgaattggtgtgactgggcttcagttaggctggcatagcagttgagagagcttagcagtgggcagcagggcactgttgggggcggtggtgagcggtggattctggctgtttggaggcaggacagtggtggaattcgatcattgattggacgtgggacagagaagggagaagagaagactcatctaggatgagtcccaggtttctggctcagtcaactggggaaacaaagtcacagagctagggagtagttagagaacacatctgggggtgtgactcatggtcagttttgggctcgtcagttttgagatgcccaaatatcatgcagatctgtcccacctgaaaatggagaagacacgggaaaggagaggagtaaaaactaactccttttcacaaagtggaagttaccagaatgtgatttcagaggccccgggggatttatcatgtgactactgacccatcccacctcttgcccctgcctgttgcacagtgggcaagaatgtttgtgacctttcactaccaccacctcccccgagcatggtccccccagttttcaatatgaaccatcctgtgggtaccctgtcacaggctggccctgaggtgagcaatatttggactgtgatgttggttgttctccactctttctacaggacagaacagggcctctagagtgggaaatggctttgggaaatatgccaagcagtagccttgttcttcaacttgcccaagaggataattctccacacccttcctgtactcagtcctcagtttgcctggtgagagagcagcctcctcccgtgtgctctgccagctggacccagactggccatattaccagtgagaccaaaaagatggaggtggggaggtagctctgaggtctgggaaaccattccagctcctgccagttttaacttgtgtttaattcctggcacagttgtcctggaaatgcctttttctcttgcctgggaaccactagaaggggatgttgtctgtgttggccagggccatgcaaattcaacatcttgtttctgcccttcccccgtgtagctgaggctaggtgttggcattacccagtgcttgttcttcagagagcaaaagcactgctcgtcatgtctgaaatttagtgagtgagctcacccactaggctggtgtttcctgcccgtggctgcacattggaagcaccggggcactttgagaactacagatgcctgggtcccagagcatctaaggtgctctagggtgtgtccaggacacagccctggttgaggaccactgctatattgtatggcctcttttaaaaaagttaattttacttggaaatgatttcaaagctacagaaaagttgcaagaataaaaactgtacaaatgaggctcaaaaaaaaaaaaaaaaaaaa

SEQ ID NO: 1944 - DNA, 535 bp, HOMO SAPIENS
  misc_feature (103)..(103): n is a, c, g, or t
tatcccagagagtttttgagcatatgggtagtgtttgtgaatttaagtttgttccccacattgtcagtttattctaaaattatcaccattttagacttaaagnaattttaaagccaaaagataagcaaacagacttgcttaggtcctgtagcaaattaattcagaccttgaacaacatttcattgtgctgtttaggaagtgttaagtatattgagattttccatattactgtgttactatcatacttaaattttagaagatgatcaaattattttaatgactaggactatgcttatgaagttagcatttcctgcccttatttatagaaagcacttgatatatttcacaaaggtgaggagattaactttttagggaacaagtcatttaaattcttgaaccagtttccatcttttaggctatatgagtattgaatataggagaaaagagaaaagtatgcatgtttctcaaaggctctttctttaaatgtcaccagcagatctaaacagtatccataggcacctatggcaaatttact

SEQ ID NO: 1945 - DNA, 513 bp, HOMO SAPIENS
aatcagagtaacctctttctccatcctccttttccacactattcttgccaaatatttctactgaaacccagtttcagcaaggcaaaatgatgggactctcaaacctccctcctcatcttcccttcccctctgtcttatgcctggcctggccttttttgttgttgttggcttttcataagtaagaaaaatttattgtagtatttcaagactgcagaatttcaagtgtatatctataaatctttttttaaaatcttcggctacacagtaacatcaattaaaacagaagagtgagtctaagtctgtaatatgctgtaggaccagataagattttgaatgagactaaacttgactgccatattttaagaggaaattgaaactttatggtggagaatggatgagagcaagtctatgatatatatgtagtcattgtataattagaaacaccaaatgctgaatcctatcactgtgttcttgggggccaggccttggatttggttgtcatttaaactcctt

SEQ ID NO: 1946 - DNA, 3715 bp, HOMO SAPIENS
gacgtcatgttcgccgggcaggcgaggaaagaggacgccatgattggttggcgctggggcggcggacggtggaagggcctggcgagtctaggttttacgcctgtgctggactttctccttccatgtttccaggccgtggggggctacagagggcgagaagtcggctcagcggaaacctggatttggttctaagccgtggggttgagaaggggtgaccggaagtgatcgtgggactgaccggaagcgaggcctggaggggaaagagagagcgagacctgggagggagggggcctccagcagaaaggggcgggggaaaaggtgcaaaagcagcgtgggagcgccgggctggcttcctgcggctgctgctggtctgactgggaagcagcaagccaccactacgaactctcaagaggagtgggagtgcgggagtccagagctgcctctgggaagtctgcagtagttgagcaaaggggtcctcacgttcctgagagctgggcaggggggattttggaacctggggcagccaagaacgagcagccaagggtacgggagattagttgtgcacagagcagtgctggtcgggcttgggggtggctggtgggcactgcgtgggaaaccttggtttgtagttttcttggtttgcgttactcctgttgggtagaattaccctccgcgcctttgtacaagacacggtgtctcctggggcaaggaaggagccaggatggcctgggctctgaagctgcctctggccgacgaagtgattgaatccgggttggtgcaggactttgatgctagcctgtccgggatcggccaggaactgggtgctggtgcctatagcatgagtgatgtccttgcattgcccatttttaagcaagaagagtcgagtttgcctcctgataatgagaataaaatcctgccttttcaatatgtgctttgtgctgctacctctccagcagtgaaactccatgatgaaaccctaacgtatctcaatcaaggacagtcttatgaaattcgaatgctagacaataggaaacttggagaacttccagaaattaatggcaaattggtgaagagtatattccgtgtggtgttccatgacagaaggcttcagtacactgagcatcagcagctagagggctggaggtggaaccgacctggagacagaattcttgacatagatatcccgatgtctgtgggtataatcgatcctagggctaatccaactcaactaaatacagtggagttcctgtgggaccctgcaaagaggacatctgtgtttattcaggtgcactgtattagcacagagttcactatgaggaaacatggtggagaaaagggggtgccattccgagtacaaatagataccttcaaggagaatgaaaacggggaatatactgagcacttacactcggccagctgccagatcaaagttttcaagcccaaaggtgcagacagaaagcaaaaaacggatagggaaaaaatggagaaacgaacacctcatgaaaaggagaaatatcagccttcctatgagacaaccatactcacagagtgttctccatggcccgagatcacgtatgtcaataactccccatcacctggcttcaacagttcccatagcagtttttctcttggggaaggaaatggttcaccaaaccaccagccagagccaccccctccagtcacagataacctcttaccaacaaccacacctcaggaagctcagcagtggttgcatcgaaatcgtttttctacattcacaaggcttttcacaaacttctcaggggcagatttattgaaattaactagagatgatgtgatccaaatctgtggccctgcagatggaatcagactttttaatgcattaaaaggccggatggtgcgtccaaggttaaccatttatgtttgtcaggaatcactgcagttgagggagcagcaacaacagcagcagcaacagcagcagaagcatgaggatggagactcaaatggtactttcttcgtttaccatgctatctatctagaagaactaacagctgttgaattgacagaaaaaattgctcagcttttcagcatttccccttgccagatcagccagatttacaagcaggggccaacaggaattcatgtgctcatcagtgatgagatgatacagaactttcaggaagaagcatgttttattctggacacaatgaaagcagaaaccaatgatagctatcatatcatactgaagtaggagtgcggcgtttcgtgcccagtggctgctccttccttcacctctgaaaacggccctcttgaagggggatatgaatggagatttgaaggtctgcaagaacctgactcgtctgactgtgtgtggaggagtccaggccatggaggcagaatcctggccctctgtgttggcccaagctcttgtggtacacacagattactgcccaatatgcagttctgcagctgttttagttaaatttctggaccttgttgttgttaaatatcagtagaaactctacataatttagagtgtatgtagggcataatgatgatgggaattgtgtgatgtttaacaggaagatcttaaattttgtgatatggagccctgtaatttttttcttatataaaaatgggtatctatattcataagactaggtcttcaatctctttgtactggtctcaaatgtactggtatctctgctttttgccacagtttgtccctgaaaactttatcagtgaggagaaatacagaattttccttttggttcccctgtaataccacaactaatagtattttcagctaacatttattgaccaggcagtgtgataaattttttgaatgaccatcttgtttaaccccctaatcacactatctgaagtaggtgctatagtgacccccaaccgaagatgaggaaatggagacacacagtggctaagtagcttgctaggtgccaggagctggcaggcagtgatgctgaaatccaaaccaggcaatctggccctccttattcaccctctcataccaccagtgctacccattataacctgtgttcacttcgcttattactgtggcccttctggtgactacaacataacactgagtatgaactgaggaattaaccactgaaagagacaaagcacacctaaataatgatgaacaaatcaagacctacaagaaatgaacacatagatgctttttaagtgtcattagttatcggaatcaaagaatttgaggtggtgacaactggggattatctgtaactccccaaatttactgttcttgaatgacattctcaaactatttattaatgagttagtctcatccctgctttctgtttcctctctctgcatcttctcttggcataggaagttattttactcatgctatgttttttaatagaagctttacaaaaaaagatgcattcccttcctgttcacactcttaccatgtttttgttcttccttaagaatgattgtgtgtgtgtgtgtgtgtgtgtgtaagtgtgtaagtgtaacatcatgggttttctttcttcacttgtaaagttttatctagaaatacttttacaggttatgttgaggtacacaaagataatgttctaagattgtgtattggatttggatttgtgtgtgtgtgtgtgtgtgtgtgtgtttaaagcatttgataaggtttaaatgttttttatacagagatttttgttcattaaactcaatctgcatcatggtctaa

SEQ ID NO: 1947 - DNA, 3177 bp, HOMO SAPIENS
ctctgtaaaataaatgcgctgggccggatcttttctgagttctcttctcccctacgaattctagatccctcctctgtcctccctgcgccagggaccttcgggcgacccttccctgtacccccaccccaccctctctggaccccgtttctgcctcagtacggcgcgctgagctctgccccctgcccaggccctgaccccctcaggagccgcggtttcctggggtaacagtgggaaacgtgtcggccgtctccgctcaggcgcttgctgtgtacagaaaggctgattcaggcacaccggctctcgtcgccttggtggccctccccagccctcctccgcgcctgctccgggtggcgctccgctgggctcctcgtgcgcctgtccgcgaccgcacccacctcatcctggcacccccatcgtggcatcacgtgttccctcatctgtcctcatggctggcgtgcccctctgcggtgagacctgcagaacaggaattggtgccgggtcagcagccggcgatgaagccggacgaagcctgcaaaccccacccatacgccagcttcacatagctcctatccattgcacagcagcgtggggaagcaccgttctctaccctccaaacaaaagcatgaaccaggtgcagtggctcacgtctgtaatcccagcattttggaggccaaggtggatggatggattccttgagtccaggagttcaagaccagcctgggcaacatggtgaacccccatctctacaaaaatttagccagttttcagctgcccccagttgcctggccaggctgcctcgacggccctattcacgggccccagcctcctcgccgggctggaaggcgacaaccgcgaaaaggagggtgactctcctcggcgggggcttcgggtgacatcacatcctccaaatgcgaaatcaggctccgggccggccgaagggcgcaactttcccccctcggcgccccaccggctcccgcgcgcctcccctcgcgcccgagcttcgagccaagcagcgtcctggggagcgcgtcatggccttaccagtgaccgccttgctcctgccgctggccttgctgctccacgccgccaggccgagccagttccgggtgtcgccgctggatcggacctggaacctgggcgagacagtggagctgaagtgccaggtgctgctgtccaacccgacgtcgggctgctcgtggctcttccagccgcgcggcgccgccgccagtcccaccttcctcctatacctctcccaaaacaagcccaaggcggccgaggggctggacacccagcggttctcgggcaagaggttgggggacaccttcgtcctcaccctgagcgacttccgccgagagaacgagggctactatttctgctcggccctgagcaactccatcatgtacttcagccacttcgtgccggtcttcctgccagcgaagcccaccacgacgccagcgccgcgaccaccaacaccggcgcccaccatcgcgtcgcagcccctgtccctgcgcccagaggcgtgccggccagcggcggggggcgcagtgcacacgagggggctggacttcgcctgtgatatctacatctgggcgcccttggccgggacttgtggggtccttctcctgtcactggttatcaccctttactgcaaccacaggaaccgaagacgtgtttgcaaatgtccccggcctgtggtcaaatcgggagacaagcccagcctttcggcgagatacgtctaaccctgtgcaacagccactacattacttcaaactgagatccttccttttgagggagcaagtccttccctttcattttttccagtcttcctccctgtgtattcattctcatgattattattttagtgggggcggggtgggaaagattactttttctttatgtgtttgacgggaaacaaaactaggtaaaatctacagtacaccacaagggtcacaatactgttgtgcgcacatcgcggtagggcgtggaaaggggcaggccagagctacccgcagagttctcagaatcatgctgagagagctggaggcacccatgccatctcaacctcttccccgcccgttttacaaagggggaggctaaagcccagagacagcttgatcaaaggcacacagcaagtcagggttggagcagtagctggagggaccttgtctcccagctcagggctctttcctccacaccattcaggtctttctttccgaggcccctgtctcagggtgaggtgcttgagtctccaacggcaagggaacaagtacttcttgatacctgggatactgtgcccagagcctcgaggaggtaatgaattaaagaagagaactgcctttggcagagttctataatgtaaacaatatcagactttttttttttataatcaagcctaaaattgtatagacctaaaataaaatgaagtggtgagcttaaccctggaaaatgaatccctctatctctaaagaaaatctctgtgaaacccctatgtggaggcggaattgctctcccagcccttgcattgcagaggggcccatgaaagaggacaggctacccctttacaaatagaatttgagcatcagtgaggttaaactaaggccctcttgaatctctgaatttgagatacaaacatgttcctgggatcactgatgactttttatactttgtaaagacaattgttggagagcccctcacacagccctggcctctgctcaactagcagatacagggatgaggcagacctgactctcttaaggaggctgagagcccaaactgctgtcccaaacatgcacttccttgcttaaggtatggtacaagcaatgcctgcccattggagagaaaaaacttaagtagataaggaaataagaaccactcataattcttcaccttaggaataatctcctgttaatatggtgtacattcttcctgattattttctacacatacatgtaaaatatgtctttcttttttaaatagggttgtactatgctgttatgagtggctttaatgaataaacatttgtagcatcctctttaatgggtaaacagcatccgaaaaaaaaaaaaaaaaaaaaaaaaaaaaaaaaaaaaaaaaaaaaaaaaaaaaaaaaaaaaaaaaaaaaaaaaaaaaaaaaaaaaaaaaaaaaaaaaaaaaaaaaaaaaaaaaaaaaaaaaaaaa

SEQ ID NO: 1948 - DNA, 3061 bp, HOMO SAPIENS
cgcctccccgcccgccccacttctcattcacttggctcgcacggcgcagacagaccgcgcagggagcacacaccgccagtctgtgcgctgagtcggagccagaggccgcggggacaccgggccatgcacgcccccaactgaagctgcatctcaaagccgaagattccagcagcccaggggatttcaaagagctcagactcagaggaacatctgcggagagacccccgaagccctctccagggcagtcctcatccagacgctccgctagtgcagacaggagcgcgcagtggccccggctcgccgcgccatggagcggatccccagcgcgcaaccaccccccgcctgcctgcccaaagcaccgggactggagcacggagacctaccagggatgtaccctgcccacatgtaccaagtgtacaagtcaagacggggaataaagcggagcgaggacagcaaggagacctacaaattgccgcaccggctcatcgagaaaaagagacgtgaccggattaacgagtgcatcgcccagctgaaggatctcctacccgaacatctcaaacttacaactttgggtcacttggaaaaagcagtggttcttgaacttaccttgaagcatgtgaaagcactaacaaacctaattgatcagcagcagcagaaaatcattgccctgcagagtggtttacaagctggtgagctgtcagggagaaatgtcgaaacaggtcaagagatgttctgctcaggtttccagacatgtgcccgggaggtgcttcagtatctggccaagcacgagaacactcgggacctgaagtcttcgcagcttgtcacccacctccaccgggtggtctcggagctgctgcagggtggtacctccaggaagccatcagacccagctcccaaagtgatggacttcaaggaaaaacccagctctccggccaaaggttcggaaggtcctgggaaaaactgcgtgccagtcatccagcggactttcgctcactcgagtggggagcagagcggcagcgacacggacacagacagtggctatggaggagaatcggagaagggcgacttgcgcagtgagcagccgtgcttcaaaagtgaccacggacgcaggttcacgatgggagaaaggatcggcgcaattaagcaagagtccgaagaaccccccacaaaaaagaaccggatgcagctttcggatgatgaaggccatttcactagcagtgacctgatcagctccccgttcctgggcccacacccacaccagcctcctttctgcctgcccttctacctgatcccaccttcagcgactgcctacctgcccatgctggagaagtgctggtatcccacctcagtgccagtgctatacccaggcctcaacgcctctgccgcagccctctctagcttcatgaacccagacaagatctcggctcccttgctcatgccccagagactcccttctcccttgccagctcatccgtccgtcgactcttctgtcttgctccaagctctgaagccaatcccccctttaaacttagaaaccaaagactaaactctctaggggatcctgctgctttgctttccttcctcgctacttcctaaaaagcaacaaaaaagtttttgtgaatgctgcaagattgttgcattgtgtatactgagataatctgaggcatggagagcagattcagggtgtgtgtgtgtgtgtgtgtgtgtgtatgtgcgtgtgcgtgcacatgtgtgcctgcgtgttggtataggactttaaagctccttttggcatagggaagtcacgaaggattgcttgacatcaggagacttgggggggattgtagcagacgtctgggcttttccccacccagagaatagcccccttcgatacacatcagctggattttcaaaagcttcaaagtcttggtctgtgagtcactcttcagtttgggagctgggtctgtggctttgatcagaaggtactttcaaaagagggctttccagggctcagctcccaaccagctgttaggaccccacccttttgcctttattgtcgacgtgactcaccagacgtcggggagagagagcagtcagaccgagctttctgctaacatggggaggtagcaggcactggcatagcacggtagtggtttggggaggtttccgcaggtctgctccccacccctgcctcggaagaataaagagaatgtagttccctactcaggctttcgtagtgattagcttactaaggaactgaaaatgggccccttgtacaagctgagctgccccggagggagggaggagttccctgggcttctggcacctgtttctaggcctaaccattagtacttactgtgcagggaaccaaaccaaggtctgagaaatgcggacaccccgagcgagcaccccaaagtgcacaaagctgagtaaaaagctgcccccttcaaacagaactagactcagttttcaattccatcctaaaactccttttaaccaagcttagcttctcaaaggcctaaccaagccttggcaccgccagatcctttctgtaggctaattcctcttgcccaacggcatatggagtgtccttattgctaaaaaggattccgtctccttcaaagaagttttatttttggtccagagtacttgttttcccgatgtgtccagccagctccgcagcagcttttcaaaatgcactatgcctgattgctgatcgtgttttaactttttcttttcctgtttttattttggtattaagtcgttgcctttatttgtaaagctgttataaatatatattatataaatatattaaaaaggaaaatgtttcagatgtttatttgtataattacttgattcacacagtgagaaaaaatgaatgtattcctgtttttgaagagaagaataattttttttttctctagggagaggtacagtgtttatattttggagccttcctgaaggtgtaaaattgtaaatatttttatctatgagtaaatgttaagtagttgttttaaaatacttaataaaataattcttttcctgtggaagagaaaaaaaaaaaaaaaaaaaaaaaaaaaaa

SEQ ID NO: 1949 - DNA, 1259 bp, HOMO SAPIENS
ggattgggatattccgactccttaagggcctggcgcacataaggtgtgaccttttcattcccgttgttatggaggtaggctctctaggaatctgggagtagtagctggggggcaagagcaaataaagagctcgagcttctgtggtctctggggagatgttcccgggaagcctgtctagagggcggagggcagctgttgagatggcgtggctccccggctcctgcgcccgcgtggctttcgcggcgggcgctgcggcccggtattggacagcctggcagggcagcgcggggccgaatccggctgccgtggctgaggctcatggatcactcttttgtggtagggccacatctgccagagcctggagtctgcgaaggccgggacccggttccccggcccacagtgggggtgtgcaaacccgagagaactggattgcgtacccactgcagagtgctgaagacggggtagccacgaggttgcaaattcgtgaagaatcagcatcatgtttggcagctgagtattggagccaggagcctgccatgaggttttgagaacagagtgctgttttagagctggcagcagcatctcagcccaagagaaggttatattcccagaggatgtcagtcccaaggaccagtagctgccatcagtttggattctgaaaactaactggcatcaacactgggtgtagaaacatgcttgccttatgtatcagaggacatgctcagcagatccaagagatatatttggcaactttttctagaaaaggcacattgggtatcattcattacattcttgagtttttttgggtttttttttttttttttgagacagtcttgctgtattgcccaggctggagtgtggtggcacaatcacagctcattgcatcctcaatcacccaggcctaagcaatcctcccaccttgtagctgggactacagctcacagcacacctggctaaaattttttttttgttgagacggattctctatgttgcccaggctggtctcaggctcctgggctcagatggtcctcctgcctcagcttccaaaggcacaggccaagttgtagctttgtcccttgccatcatgcccaacaagaggttctataccttttaatgaattgactttcataaattggttatgttggtgggcaaagttctttaagctggaaattgtaaattcctcctgaaatgttttttcatgcagttaccatgaactaatactacaataaaggatggtcttgggtgtcaattcttgaaaa

SEQ ID NO: 1950 - DNA, 2695 bp, HOMO SAPIENS
caaataaaagcgatggcgattgggctgccgcgtttggcgctcggtccggtcgcgtccgacacccggtgggactcagaaggcagtggagccccggcggcggcggcggcggcgcgcgggggcgacgcgcgggaacaacgcgagtcggcgcgcgggacgaagaataatcatgggccagactgggaagaaatctgagaagggaccagtttgttggcggaagcgtgtaaaatcagagtacatgcgactgagacagctcaagaggttcagacgagctgatgaagtaaagagtatgtttagttccaatcgtcagaaaattttggaaagaacggaaatcttaaaccaagaatggaaacagcgaaggatacagcctgtgcacatcctgacttctgtgagctcattgcgcgggactagggagtgttcggtgaccagtgacttggattttccaacacaagtcatcccattaaagactctgaatgcagttgcttcagtacccataatgtattcttggtctcccctacagcagaattttatggtggaagatgaaactgttttacataacattccttatatgggagatgaagttttagatcaggatggtactttcattgaagaactaataaaaaattatgatgggaaagtacacggggatagagaatgtgggtttataaatgatgaaatttttgtggagttggtgaatgcccttggtcaatataatgatgatgacgatgatgatgatggagacgatcctgaagaaagagaagaaaagcagaaagatctggaggatcaccgagatgataaagaaagccgcccacctcggaaatttccttctgataaaatttttgaagccatttcctcaatgtttccagataagggcacagcagaagaactaaaggaaaaatataaagaactcaccgaacagcagctcccaggcgcacttcctcctgaatgtacccccaacatagatggaccaaatgctaaatctgttcagagagagcaaagcttacactcctttcatacgcttttctgtaggcgatgttttaaatatgactgcttcctacatcgtaagtgcaattattcttttcatgcaacacccaacacttataagcggaagaacacagaaacagctctagacaacaaaccttgtggaccacagtgttaccagcatttggagggagcaaaggagtttgctgctgctctcaccgctgagcggataaagaccccaccaaaacgtccaggaggccgcagaagaggacggcttcccaataacagtagcaggcccagcacccccaccattaatgtgctggaatcaaaggatacagacagtgatagggaagcagggactgaaacggggggagagaacaatgataaagaagaagaagagaagaaagatgaaacttcgagctcctctgaagcaaattctcggtgtcaaacaccaataaagatgaagccaaatattgaacctcctgagaatgtggagtggagtggtgctgaagcctcaatgtttagagtcctcattggcacttactatgacaatttctgtgccattgctaggttaattgggaccaaaacatgtagacaggtgtatgagtttagagtcaaagaatctagcatcatagctccagctcccgctgaggatgtggatactcctccaaggaaaaagaagaggaaacaccggttgtgggctgcacactgcagaaagatacagctgaaaaaggacggctcctctaaccatgtttacaactatcaaccctgtgatcatccacggcagccttgtgacagttcgtgcccttgtgtgatagcacaaaatttttgtgaaaagttttgtcaatgtagttcagagtgtcaaaaccgctttccgggatgccgctgcaaagcacagtgcaacaccaagcagtgcccgtgctacctggctgtccgagagtgtgaccctgacctctgtcttacttgtggagccgctgaccattgggacagtaaaaatgtgtcctgcaagaactgcagtattcagcggggctccaaaaagcatctattgctggcaccatctgacgtggcaggctgggggatttttatcaaagatcctgtgcagaaaaatgaattcatctcagaatactgtggagagattatttctcaagatgaagctgacagaagagggaaagtgtatgataaatacatgtgcagctttctgttcaacttgaacaatgattttgtggtggatgcaacccgcaagggtaacaaaattcgttttgcaaatcattcggtaaatccaaactgctatgcaaaagttatgatggttaacggtgatcacaggataggtatttttgccaagagagccatccagactggcgaagagctgttttttgattacagatacagccaggctgatgccctgaagtatgtcggcatcgaaagagaaatggaaatcccttgacatctgctacctcctcccccctcctctgaaacagctgccttagcttcaggaacctcgagtactgtgggcaatttagaaaaagaacatgcagtttgaaattctgaatttgcaaagtactgtaagaataatttatagtaatgagtttaaaaatcaactttttattgccttctcaccagctgcaaagtgttttgtaccagtgaatttttgcaataatgcagtatggtacatttttcaactttgaataaagaatacttgaacttgtcaaaaaaaaaa

SEQ ID NO: 1951 - DNA, 3618 bp, HOMO SAPIENS
cgaaggggcgtggccaagcgcaccgcctcggggcggggccggcgttctagcgcatcgcggccgggtgcgtcactcgcgaagtggaatttgcccagacaagcaacatggctcggaaacgcgcggccggcggggagccgcggggacgcgaactgcgcagccagaaatccaaggccaagagcaaggcccggcgtgaggaggaggaggaggatgcctttgaagatgagaaacccccaaagaagagccttctctccaaagtttcacaaggaaagaggaaaagaggctgcagtcatcctgggggttcagcagatggtccagcaaaaaagaaagtggccaaggtgactgttaaatctgaaaacctcaaggttataaaggatgaagccctcagcgatggggatgacctcagggactttccaagtgacctcaagaaggcacaccatctgaagagaggggctaccatgaatgaagacagcaatgaagaagaggaagaaagtgaaaatgattgggaagaggcgaagacaagagaaagaagtgaaaagataaaactggagtttgagacatatcttcggagggcgatgaaacgtttcaataaaggggtccatgaggacacacacaaggttcaccttctctgcctgctagcaaatggcttctatcgaaataacatctgcagccagccagatctgcatgctattggcctgtccatcatcccagcccgctttaccagagtgctgcctcgagatgtggacacctactacctctcaaacctggtgaagtggttcattggaacatttacagttaatgcagaactttcagccagtgaacaagataacctgcagactacattggaaaggagatttgctatttactctgctcgagatgatgaggaattggtccatatattcttactgattctccgggctctgcagctcttgacccggctggtattgtctctacagccaattcctctgaagtcagcaacagcaaagggaaagaaaccttccaaggaaagattgactgcggatccaggaggctcctcagaaacttccagccaagttctagaaaaccacaccaaaccaaagaccagcaaaggaaccaaacaagaggaaacctttgctaagggcacctgcaggccaagtgccaaagggaagaggaacaagggaggcagaaagaaacggagcaagccctcctccagcgaggaagatgagggcccaggagacaagcaggagaaggcaacccagcgacgtccgcatggccgggagcggcgggtggcctccagggtgtcttataaagaggagagtgggagtgatgaggctggcagcggctctgattttgagctctccagtggagaagcctctgatccctctgatgaggattccgaacctggccctccaaagcagaggaaagcccccgctcctcagaggacaaaggctgggtccaagagtgcctccaggacccatcgtgggagccatcgtaaggacccaagcttgccagcggcatcctcaagctcttcaagcagtaaaagaggcaagaaaatgtgcagcgatggtgagaaggcagaaaaaagaagcatagctggtatagaccagtggctagaggtgttctgtgagcaggaggaaaagtgggtatgtgtagactgtgtgcacggtgtggtgggccagcctctgacctgttacaagtacgccaccaagcccatgacctatgtggtgggcattgacagtgacggctgggtccgagatgtcacacagaggtacgacccagtctggatgacagtgacccgcaagtgccgggttgatgctgagtggtgggccgagaccttgagaccataccagagcccatttatggacagggagaagaaagaagacttggagtttcaggcaaaacacatggaccagcctttgcccactgccattggcttatataagaaccaccctctgtatgccctgaagcggcatctcctgaaatatgaggccatctatcccgagacagctgccatccttgggtattgtcgtggagaagcggtctactccagggattgtgtgcacactctgcattccagggacacgtggctgaagaaagcaagagtggtgaggcttggagaagtaccctacaagatggtgaaaggcttttctaaccgtgctcggaaagcccgacttgctgagccccagctgcgggaagaaaatgacctgggcctgtttggctactggcagacagaggagtatcagcccccagtggccgtggacgggaaggtgccccggaacgagtttgggaatgtgtacctcttcctgcccagcatgatgcctattggctgtgtccagctgaacctgcccaatctacaccgcgtggcccgcaagctggacatcgactgtgtccaggccatcactggctttgatttccatggcggctactcccatcccgtgactgatggatacatcgtctgcgaggaattcaaagacgtgctcctgactgcctgggaaaatgagcaggcagtcattgaaaggaaggagaaggagaaaaaggagaagcgggctctagggaactggaagttgctggccaaaggtctgctcatcagggagaggctgaagcgtcgctacgggcccaagagtgaggcagcagctccccacacagatgcaggaggtggactctcttctgatgaagaggaggggaccagctctcaagcagaagcggccaggatactggctgcctcctggcctcaaaaccgagaagatgaagaaaagcagaagctgaagggtgggcccaagaagaccaaaagggaaaagaaagcagcagcttcccacctgttcccatttgagcagctgtgagctgagcgcccactagaggggcacccaccagttgctgctgccccactacaggccccacacctgccctgggcatgcccagcccctggtggtgggggcttctctgctgagaaggcaaactgaggcagcatgcacggaggcggggtcaggggagacgaggccaagctgaggaggtgctgcaggtcccgtctggctccagcccttgtcagattcacccagggtgaagccttcaaagctttttgctaccaaagcccactcaccctttgagctacagaacactttgctaggagatactcttctgcctcctagacctgttctttccatctttagaaacatcagtttttgtatggaagccaccgggagatttctggatggtggtgcatccgtgaatgcgctgatcgtttcttccagttagagtcttcatctgtccgacaagttcactcgcctcggttgcggacctaggaccatttctctgcaggccacttaccttcccctgagtcaggcttactaatgctgccctcactgcctctttgcagtaggggagagagcagagaagtacaggtcatctgctgggatctagttttccaagtaacattttgtggtgacagaagcctaaaaaaagctaaaatcaggaaagaaaaggaaaaatacgaattgaaaattaaggaaatgttagtaaaatagatgagtgttaaactagattgtattcattactagataaaatgtataaagctctctgtactaaggagaaatgacttttataacattttgagaaaataataaagcatttatctaaaaaaaaaaa

SEQ ID NO: 1952 - DNA, 3157 bp, HOMO SAPIENS
ggaagcgagccctagaattatggcgacctccgcgacgtcgccgcacgcgcctggttttccagctgagggtagatgcggttactatgtggaaaagaagaaacggttctgcaggatggtggtggccgcagggaaaagattttgtggtgaacacgctggagccgcggaggaagaagatgctcggaaaagaatcctgtgtcctttagatccaaaacacacagtatatgaagatcaactagcaaagcatttgaaaaaatgtaactcaagagagaaaccaaaacctgatttctatattcaagatattaatgcaggcttaagagatgaaacagaaatacctgaacaattagttccaatttcttctctatctgaagagcagttggaaaagttaattaagaaattgagaaaagcaagtgaaggcttgaattctacacttaaagatcatattatgtcccatccagcattacacgatgcacttaatgaccctaaaaatggcgattctgcaaccaagcacctgaaacagcaggcttctattttaggtaacattgaaaatttaaagttacttggtccaagaagatgctttgttgagtttggagcgggaaagggaaaattatctcattgggttgatattgccttaaaagatgctgaaaaagttcacttcatcctagtggaaaaggtgaccacaagattcaaggtggatggaaaacacagaaagaaaaattcagtgtttgaaagacttcaaattgatattcaacacttgtgtttgaacaagattcctgtgctaagagaagaaaaactacctgtggtaggaattggaaagcatctgtgtggtatggcaacagatcttgcattacgatgtttggttgaaacctatgctgccagttttgaggaaaggaatgaagaacctttagccaaacgcataaagaatgataaaacagaaaaagaaatttacactttggccaaggaaggaaatgaaaaaaatgtcccagagaagtggaaccctgtggctggcattgttattgcactctgttgtcaccacaggtgtgattggagacattatgtgggcaaagaatatttcagggctctaggccttggagcagtggaattccattatttccagcgaatgagtagttgggcaacttgtgggatgcggaaaacatctttggaaacctcaaatagtaccacaaagaggcaagataatcagaatgatgatagtgaagagcatgatgatggaggatacagaatcacagatgatggcgctgattgtttgcctgggcttcttagtgttgaagaaaagaagaaaatagggcatctttgtaaattgctgattgaccaaggtcgaatccagtatttgcagcagaagggattcagtcctgctttgcagtactatacagaccctctggtgtctttggaaaatgttttgttaactgctttaccaaatcattcttcatcaccagaaacaactgcttaatggaaaagaaatttgagcatcatctgtcttccaccaaaaaaaattttttaattatatttttatatcaaaaaaatatatactttaaatagcaaataatatgaactttaaaaaatgctgtggcctcattaaactttggtaatagcttttctttttacttcagaaatccaaacattagagaattcaccaaagtaatcctctttagaagggcatcttgaattatattatccatccgtatttatggagattggtaaagtagttgaaccgttgacttggtgatctgaaacatacataacatgtcaacacataattagcgtatttctgtttgtattaattttggaaatttatcttcctttgattttatttaatattttttatttcttaagttcaagaggtagtgattgattgtaacaagggccaatctgagaatttgacttatatgtggacatttttccctacagatctggaaagcacaattgtgattttctcaaatgcagacaattcagagatattcacaattaataaacacaattaattaatgaagtcaccttcaaatttccagagccatacatgtatatattgtcagaatctgtccatgacaaacacaaaactgaagagctgttttcaaagaaaaaagattatttcacttaattattttgttggataattgtctagttagaacttccaaaaagatacttacaaacataattcacaaatttgaaataatttctgaagttgattagctatctcatatcttttatcaggtcattttttatatatgtaggcacaaacaataagtatgttctcttctgtttgggaaaataatttggaataaaatagaaattagataatgaaaccaaaaaccttctcaaatttaggccttatttaactcatgactggtttctatgcacaagaaaatactaaaccaaatatatggtaggactgttattctcttctgcatcttatccctattttgtttctgcctttatttgtaaaaattgtcttaattgatggtacatttgccaagacaaaggttcagaattactaattttagatattatgatattctgaaataactatttttatcctgtagttctatgattatatgatttgtaaataagaagcctaaccaatttaaaattcctgactttagtctcatatatcttgtcagactgtctcggttcaaattccaaacctaccatcttcagttgtgcgaccttgggcatgctacctaatctctttgtgcctcaatttcctccttttaaaatggggatgatgatgataacaataatacctacctcacaaggttgttgtgagcatcaaatgagataacacaagtaaaatgcatagaacagttccaagcacagagtaattcaataaatattaactagtaatagtagtggtagtaactcgtgaatctttttaataacataataggctttgattttattatctctttaagttgttaacttttttcccttgttataagttttatgtcaagtaaggtagtttgtttaagttagttacccatgtccccaatcaagggaacctaaatgaagatatatcattaaataattaacctttttttattgtgtcaagcaatactaatttgtgtcataaaatttgttttgcatcattcaacaatttatgcccagaaataaacaatattctacaacaggcaaaaaaaaaaaaaaa

SEQ ID NO: 1953 - DNA, 432 bp, HOMO SAPIENS
  misc_feature (39)..(39): n is a, c, g, or t
  misc_feature (113)..(113): n is a, c, g, or t
gcatgaaaaccttttgtgcgctgctgaagctctagtgcntgcaaatgtcgggtacatagtagccacttagtaagtattaagtggattgaggaccatgatcattcattgacagnttattaggtttgccttcagctctcagtcccgtgggggtacatggacacataaataggtcatccaagtttagtgagaattggtgggaaggcaagaaatggaaataaggaaggatgggcacttggtcaatatttacatagactttacccaaatattgggctttttgtaaacatagaatctgttgcttcttaaagcctaagcccgttggaaattggggtaatgtgagcaatttctttctttccatcaaagaggtggtatggcatgcaagaaaaagcaagattcaaaactttaatagcatttgtcttgatgtcttgctttaga

SEQ ID NO: 1954 - DNA, 2656 bp, HOMO SAPIENS
gtgtgtgtggcgcctgcgcagtggcggtgaccaccggctcgcggcgcgtggaggctgctcccagccgcgcgcgagtcagactcgggtgggggtcccggcggcggtagcggcggcggcggtgcgagcatgtcgtggctcttcggcattaacaagggccccaagggtgaaggcgcggggccgccgccgcctttgccgcccgcgcagcccggggccgagggcggcggggaccgcgggttgggagaccggccggcgcccaaggacaaatggagcaacttcgaccccaccggcctggagcgcgccgccaaggcggcgcgcgagctggagcactcgcgttatgccaaggacgccctgaatctggcacagatgcaggagcagacgctgcagttggagcaacagtccaagctcaaaatgcggctggaagccctgagcctgctgcacacactagtctgggcatggagtctctgccgtgccggagccgtgcagacacaggagcggctgtcaggcagtgccagccctgagcaagtgccagctggtgagtgctgtgctctgcaggagtatgaggccgccgtggagcagctcaagagcgagcagatccgggcgcaggctgaggagaggaggaagaccctgagcgaggagacccggcagcaccaggccagggcccagtatcaagacaagctggcccggcagcgctacgaggaccaactgaagcagcagcaacttctcaatgaggagaatttacggaagcaggaggagtccgtgcagaagcaggaagccatgcggcgagccaccgtggagcgggagatggagctgcggcacaagaatgagatgctgcgagtggaggccgaggcccgggcgcgcgccaaggccgagcgggagaatgcagacatcatccgcgagcagatccgcctgaaggcggccgagcaccgtcagaccgtcttggagtccatcaggacggctggcaccttgtttggggaaggattccgtgcctttgtgacagactgggacaaagtgacagccacggtggctgggctgacgctgctggctgttggggtctactcagccaagaatgccacgcttgtcgccggccgcttcatcgaggctcggctggggaagccgtccctagtgagggagacgtcccgcatcacggtgcttgaggcgctgcggcaccccatccaggtcagccggcggctcctcagtcgaccccaggacgcgctggagggtgttgtgctcagtcccagcctggaagcacgggtgcgcgacatcgccatagcaacaaggaacaccaagaagaaccgcagcctgtacaggaacatcctgatgtacgggccaccaggcaccgggaagacgctgtttgccaagaaactcgccctgcactcaggcatggactacgccatcatgacaggcggggacgtggcccccatggggcgggaaggcgtgaccgccatgcacaagctctttgactgggccaataccagccggcgcggcctcctgctctttgtggatgaagcggacgccttccttcggaagcgagccaccgagaagataagcgaggacctcagggccacactgaacgccttcctgtaccgcacgggccagcacagcaacaagttcatgctggtcctggccagcaaccaaccagagcagttcgactgggccatcaatgaccgcatcaatgagatggtccacttcgacctgccagggcaggaggaacgggagcgcctggtgagaatgtattttgacaagtatgttcttaagccggccacagaaggaaagcagcgcctgaagctggcccagtttgactacgggaggaagtgctcggaggtcgctcggctgacggagggcatgtcgggccgggagatcgctcagctggccgtgtcctggcaggccacggcgtatgcctccgaggacggggtcctgaccgaggccatgatggacacccgcgtgcaagatgctgtccagcagcaccagcagaagatgtgctggctgaaggcggaagggcctgggcgtggggacgagccctccccatcctgagtccacagggagatccacagctcacggagcctggccgcggacccctcccacccctgccttgccggcccctgcacatttaggatatgctcctgggtggggactgggctgtgcccagggcctctgtcccccaggatgtcttgtggtgcgggtcggccgttctgccccccagggcaccccctgttgtaggcactggctagggaggggcaggcctccttcctgcccctcgagacactcttgggagatgcattttccgtctggctcacagggggagggtgaggctttgcaccccagcccctgcccaggccactgtgagggtgggtgctggctgagcccccggggcagcaggagccaggcaggtgatgtctttgttctcggctcccacagcagagccaggtgagggggcgcctgccagggccagacccaggtggggcagcctgaaccctgcttccccctgtggccggcatgccccgatctttcacacactggtgaccctgagagaggagggaggagggaacctggcgggggtgtctgaggccgcactgtcagctggccggtccaagcctgtggctggagctggggtctgtttacctaataaagtcccacaggtgcctcattaaaaaaaaaa

SEQ ID NO: 1955 - DNA, 6462 bp, HOMO SAPIENS
ggcctttctcgtcttttaagggtttttacttccatggggaactatgtgttggatgagaaaagtatccggggaaggggacagaggttcagaaagctctgcgagtcctggacgctggtctgccttcttggctcaccctggaaggtggacgctggccccacacatcccctcttaaagacgcaggccgatagccagcagatcctggggcttgctggccccaagtgagttgtcagggtttcagaggacaccagtcatggcaaccccagctccatggctgccacacaggcctgggcttcccaggactgcctccttcttgttcgcttatgtagatgaaaaatgaggtaacggcactcccctgccccaccctcctcccagaagtgcccagggtgtaaacgcaatagcttgtgtgaagtccactggaacccaggctcaccaagtcagtcttaaccaacacaggccccagcacccgcagagcagacactgcgatgacaacggacgacacagaagtgcccgctatgactctagcaccgggccacgccgctctggaaactcaaacgctgagcgctgagacctcttctagggcctcaaccccagccggccccattccagaagcagagaccaggggagccaagagaatttcccctgcaagagagaccaggagtttcacaaaaacatctcccaacttcatggtgctgatcgccacctccgtggagacatcagccgccagtggcagccccgagggagctggaatgaccacagttcagaccatcacaggcagtgatcccagggaagccatctttgacaccctttgcaccgatgacagctctgaagaggcaaagacactcacaatggacatattgacattggctcacacctccacagaagctaagggcctgtcctcagagagcagcgcctcttccgacagcccccatccagtcatcaccccgtcacgggcctcagagagcagcgcctcttccgacggcccccatccagtcatcaccccgtcacgggcctcagagagcagcgcctcttccgacggcccccatccagtcatcaccccgtcatggtccccgggatctgacgtcactctcctcgctgaagccctggtgactgtcacaaacatcgaggttattaattgcagcatcacagaaatagaaacaacgacttccagcatccctggggcctcagacacagatctcatccccacggaaggggtgaaggcctcgtccacctccgatccaccagctctgcctgactccactgaagcaaaaccacacatcactgaggtcacagcctctgccgagaccctgtccacagccggcaccacagagtcagctgcacctgatgccacggttgggaccccactccccactaacagcgccacagaaagagaagtgacagcacccggggccacgaccctcagtggagctctggtcacagttagcaggaatccccttgaagaaacctcagccctctctgttgagacaccaagttacgtcaaagtctcaggagcagctccggtctccatagaggctgggtcagcagtgggcaaaacaacttcctttgctgggagctctgcttcctcctacagcccctcggaagccgccctcaagaacttcaccccttcagagacaccgaccatggacatcgcaaccaaggggcccttccccaccagcagggaccctcttccttctgtccctccgactacaaccaacagcagccgagggacgaacagcaccttagccaagatcacaacctcagcgaagaccacgatgaagcccccaacagccacgcccacgactgcccggacgaggccgaccacagacgtgagtgcaggtgaaaatggaggtttcctcctcctgcggctgagtgtggcttccccggaagacctcactgaccccagagtggcagaaaggctgatgcagcagctccaccgggaactccacgcccacgcgcctcacttccaggtctccttactgcgtgtcaggagaggctaacggacatcagctgcagccaggcatgtcccgtatgccaaaagagggtgctgcccctagcctgggcccccaccgacagactgcagctgcgttactgtgctgagaggtacccagaaggttcccatgaagggcagcatgtccaagcccctgaccccagatgtggcaacaggaccctcgctcacatccaccggagtgtatgtgtggggaggggcttcacctgttcccagaggtgtccttggactcaccttggcacatgttctgtgtttcagtaaagagagacctgatcacccatctgtgtgcttccatcctgcattaaaattcactcagtgtggcccagaggctgtctattgatctgcatgctttcgccatttttatagtacagggattgtgtatagtctcactgctacctcctccttctactcccccaggtcttggtttggactttgatgatagcatttactgagacgggcctggagcctgtcgaacagcccgctgcagcagggcagggaccacctttgttcatctcagtatcccctgaactagcagagtgtctggcctgcagtgggatcgcagagaatgtggaattgacctaaatttaaatttcaagttctggacacaagcctcaattattcctcttatatgttataacttacatgctattatttttttaaaaaattaatatggtttactttttattataaaagtaaaacttggccaggctcagtggctcacgcctgtaatcccagcactttgggaggccgaggccggtggatcacgaggtcaggagtttgagactagcctggccaacatggtgaaaccccgtctctactaaaaacacgaaaattagctgggtgtggtggcaggtgcctgtaatcccagctacccaggaggctgagacgggagaatcacttgaacccgggaggcagaggttgcagtgacccaagatcctaccactgcaccccagcctgggcaaaagggcaagactctgtctcataaataaataaatttaaaataaaagtaaaacttgtttatgatttcaaaattttgaaatattccaaagaccaagcaaagtaagaagtgggaagaggagaaagaaaaacttttctataatcccacctcttagatacaacgatttattttttaaaattgagacagggtctcactctcacccaaactgcagtgcagtggtgcgaccatggctcactgcagcctccacctcccagctccagtgatcctcccacctcagcctcctgaggagctgggaccacagctggctaatttttgtactttgttttgtaaaaaaggggctttaccatgttgagcaggttggtctcgatcttctgagctcaagcagtcctcctgcctcagactcgcaaagtgctgggattacagacatgagccactgtgcccagccttatatacagctattattattaatgtatactgtgtattcatttcaattcttaatctctccacttggatgttgatgaaatacatacctcacattcaacatttctttctttttttttttctttttgagatggaaaggagcctggctctgtcacccaggctggagtgcagtggcgtgatctcagctcactgcaagctccacctcttgggttcacgtgattctcctgcctcagcctcctgagtatctgggactacaggtgccaccaccatgctcggctaattttttgaatttttagtagagacggagtttcaccgtgtcagccagcctggtctcaaactcctgacctcaagtgatccacccacctcggcctcccaaagtgctgggattccagttaatgagcactgctcctggcctccacatttctaaaatcgaagttctgatcttttcctctggacctgccccacctgcatcttccccatctcagttaacgtcagttgcatccttcaggtgctcaggccgaaatcctcggcaccgtctttattcccctctcacattttgcaccaggaaattctgctggctctaaggccatcaaactgtgcccagaatgtggcccctcctcagcatctccagtgctaccaccgagatggtccacgatgccatcatctctcacctgcactactacaggtctccctgtttccagctcagcccccaccccagtctagtcccagtgtgtcagccagggctgtctttttacaacataaggcagaccacaccacttctttgctccaatcctcccatttcactcagaagaaaagctccgacaacagctgcaaagccgtgcacgacctgcgcccctcccctgcctccttaatttgctgactgcaccgcagccacacggacgtctttcttgtcccttgaatgcgctgggcctgctcttgccttgggacctttctgtgcattgcttagtctgctcagaagccttctcctctacatatccacttgtctaaaccctctacctccaccttcatgccccttctcagcgaggtctaccatgaccatgctgcctacaaattcagtctccccttctgtactttgacgtactttatagtgctgatcacaattgaacgtcatacatattttgttttctttattatctgagtcctccaactagaatgaaagattttgcccattatggtttccctagtgccaagaacagtacctggcacataccaggggctcagtaaacatttgttagatgaatgaaggaaacaaggagacaatgttgatgctgctgtgagcaaggggagtctgaacgtttgacagatcccttccatttctggagtggggcagaatgagtttcataaagtagctcggacaaaaataattcgctcatcttggcatatatgttgggcagctgccgcagaagagagactgagctatgtgccgtggaggattcaaatctgtctcttctcccagggattgaagttagacacgtacagcaataataagttgaaagaacttatttacaccgcatatagcaacaacaggatgcccttaatatatagagaactcttacagcgcaagaaaataaaaaggcaaacataccagtagaaaaatgggtaaatggcaacaggtaattcacaaaagaagaaatacaaatgtcctctcctcccgccaccaccccccatgaaaaagaacgtgtgacttcagtagcaaaaacaggtccattaatacagtgagatattgcttattgtatgtctgtactgatctatactgggtgctgggcaaacgggcattcttaaacactcctagtagggaagaaattggtacaacctttccggaggacaatttaactgatttatttaaagcccgaaaaatgtacatacctttaactcagcagtttcgttactgatttatcttaaggaagtaatttagaatctgtgcctaactgtttacaataactcatagatgaaaaaggcaaaacaaaacacaagtaacctcaaatctccccatgtaacagtttgcttaaacactatagcgttattttacgcaagctacagaagcattgttgaaacatatatttattaggacagaaaaaaattcatgaaatgttattttatcttcttttttcttaaaatggaacttaaaaaaaatttttttaactccaacctaccttttacaccatctgcagagctttcctctcccaaatcaaagctactcctgttcctacctccaggatggaatccccaccttcgtatgcaagggtcttcatgatatggcctcagccaactatcttagctccaggtcacggccccatcttccatatcctatgctgcttgcacaggaagcagctcgctaaccccaggcacacctgctttcatctggagcgtctgcccatcatgattcctccccctggtcccttcacctggaaaactcctattcattcctcaaagcccagttcagatggcacctctccatgacttcatcagattccctacagaggtgctgattttctggtctcttgtgtttctgttgtaacacttaacatgctgtattataatgtgcttattttatttacaagtttgttacattgtacgtgctcgaggacaagcagccggtagtattcacctctgtcatcacagaagctggcgtggagccctccacatgagggcactgatgtgtttgctgagtgactgggacaatggtgggccacgtgagccccgaaactttcagtgggctctgaaagttaagaaaagggcattcagtactgaaatcacacaaaacgtaaatttaatgatataattgttccgaagctgctctataatttggcatgaatggagagcagtttacaaaaatgacaacaccactgttatataaacccaattcttaaataggttttcttctcttgctttgtatttcctcaagtgggtgatacttaatacagtggctcatgtaatcttaattactacatatgaggacacggacatgtacatatgatgctgattactgttatttttggaagtaaaaaaattgtaaaatttgaaaaaaaaaaaaaaaaaa

SEQ ID NO: 1956 - DNA, 6213 bp, HOMO SAPIENS
cagtctttgattggttgctgagaggcggggctactcgactgctctggaggtagcggccgcggtgaggagagccatgggacgggcagtcaaggttttacagctctttaaaacactgcacaggaccagacaacaagtttttaaaaatgatgccagagcattagaagcagccagaataaagataaatgaagaattcaaaaataataaaagtgaaacttcttctaagaaaatagaagagctaatgaaaataggttctgatgttgaattattactcagaacatctgttatacaaggtattcacacagaccacaatacactgaaactggtccctaggaaagaccttcttgtagaaaatgtgccatattgtgatgcaccaactcagaagcaatgagttttctagaatacaacaagtctttgtactttttaactttaaaatctacaactctggcaaaagtcctggaaatgcagacattttccctgaactggcatattgaaaatgaatgaattacagaatagcttcatatttaaatttcatgttaaaaggtcattactgagaactaaagaacataattaagtatttctaaaggaaattagataagaaaacatttcattttcattgaaaatcaaatttcataaagcaaagtaaatgcttagggagatatattcaatctttgaccttgatgagtatttgatcttaccatagctatttgagaatgtggtgcttttacaaattggtgagttttcctgccatgtgaaatgcaattattacatttaaattgttagattaaaatgatatttagtcctgaaaaatattaaattggtcaaaaaaatcacagtgtatgccagctctctacagaaagtggcctttgttttctaaagcactgggattatttctgtagctaatatataattgtacagtttctttttagagatagagagtatctctgtgttcttatgaagacattttttatcagttttctgaaaatagatgaataaaatattatagtcacctagggtcactatggaataaagaaatcctagtttaaagaggaaatagtggcccttgatcaaactatttaatatggccttagtagaattagctgtatttagacaaagttagactttagtgtgaaatgtaatcggtggctacattctcatcgttttaattaatgaaacttaaatggcttctcttcttccacatgtcctgtccttgacaagatgggcagtatcacaaaaggtcctggcattctaccatctaacactaggaactgtaaaatactgtttaatattcttcttgtttctcttttatctgtgtatctttgccattctattttctcagtgaatagtatgttttctcccattcactgataaattctctcatttgatgatgatacagggtttttaatttttgcaagattctcaatgcaagcattgttatgtatctagaaattatacctagagaaaaatgaaagtcgtttcaaatttgaaatttgcccttttaagagaatgctgaatgtcatcgcagtatataatcactatataaatgtgctgacttacagttattttagtgtctatatgacatattttgaggaaagttggctgacgttatttaaatttaatatatattctatattttagtgttattgaatattttatcactgagcttttttctttaacctgaattccctgttccatttttcattcatattaatttaaataactccagatttctttcttatagtcattattagtagcagatgagattaataattcacatgtttattaaagatagtggcttagaaattttaagatatattgatataggcccgggcgctgtggctcacacctgtaatcccgcactttgggaggctgaggcgggcagatcacaaggtcaggagttcgagaccagcctggccaatgtggtgaaaccccatctctactaaaaacacaaaaattagccaggtatggtggcgggcgcctgtagtcccagctactcgggaggctgaggcaggaaaatcacttgaacccgggaggtggaggttgcagtgaactgagattgtgccactgcactccagcctgggggacagagtgagactctgtctcaaaaaaaaaaaagaaaaaaaaaggaaaaaggaaaaaaaaaagatatattgatacagataggtagatatgatattgtactttcatgccataagactacacaataaagttcctgaaagttcctggctgggcgcagtggctcacgcctgtaatcccagcactttgggaggccgaggcaggcagatcacctgaggtcaggagttctagaccagcctgaccaacatggggaaaccctgtctctactaaaaaaaatacagaattagccaggtgtggtggcacatgtctgtaatcccagctactcgggagactgaggcaggagaattgcttgaacccaggagacggaggttgcagtgagccgagatcgcaccattgcactccagcctaggcaacaagagtgaaactccgtctcaaaaataaataaataaataaagttcctgtgaagtatataaacatgtcaacaacaggcttgactgtcacaaaattctgaaagatgtcgcactctattcttatatagcatatgctaatttatttatttattttttgagattgagttctgctgtgtcacccaggttggagtgcagtggcatggtcatggtccactaaagccttgacccctggggctcagcagttatgccaactaagcctcccaaatagctgagactagaggtatgcgccaccacacctagctattttttttatttttagtaaggacaaggtctcattatgttggccaggctggtctcaaattcctgagctcagttgatcctcccacctcagcctcccaaagtgctgggattacaggtgtaagccactgcaccctgcctattcttataatcatatatttatatttcaaatggattttaactggttatttaatagtttaattagataaagtaattcatggctgggtgtggtggctcacgcctgtaatcccagcactttggcaggctgaggcaggtggattacctgaggtcggaagttcgagaccagcccaaccaacgtggagaaaccccatctctattaaaaatgcaaaattagcaggacatggtgatacacacctgtaatcccagctagtcaggaggctgaggcaggagaattacttgagccagggaagcagaggttgtggtgagctaagattgtgccactgcactccagcctgagagaacaagactccgtctcaaaaaaagaaaaaaagaaaacttttttacacatgggtatctcaccatgttgcccaggctggagtgcagtagctattcataggcacagtcatagcacactgcagcctagaatttctgacctcaagcaatcatcctgcctcagcctcctaagtagctaggactacaggtgcataccaccataaccagctttaattaaatgttttttatttggttattttttttaagttttctgtattcacacaaggggttgcccaaatataattttgctttgactattgagatctagtgaaagtggggtatatgaattctaattgcaaatatccaggctcagaggcccagcaggactttctaacacaatcttttagcggaagttagaaatggtatatagcaggagagtcagatttgagaagcatatgtagattcgaagctgggggaatatggcaggtagtttgtacaacatctaattcagaacattaaaattaagattttagtcaaactgtgtttaagttagttcttattttcctgtagatgcatctcacagcatcagtacaataccaaaaaagcacacaagaataagaatatgtggaatttctatacctattgacaaagcacataatttaaccataaacacaaagccataggtcaacaaagaaatgaagattccagttctgaaggtgagttttctgaagccaaagtggatacatgcaaaattaatatagttttactgtatatcagttgtcaccaatcagaaatggaaaacagatcctatttataattgcaaacaaaactgtaaaatagactttttaaagtctgggaatagacttctaaaataagctataacacttaaaaaggagagatatactatgttcctagataggacaattgaaaattctggagatgacagtttttcaaaaatctattgaggccaggtgcagtggcccatgcctgtagttccagtactttgggaggcctaggtgggtggatcacctgaggttgggagtttgagaccagcctgaccaacatggagaaaccccgtctctactaaaaatacaaaattagccaggcgtggtggtgcatgcctgtaatcccagctactcgggaggctgaggcgtgagaatcgcttgaacccggtaggcagatgttgcagtgagccgagatcgcaccattgcactccagcctaggcaacaagagcgaaactccatctcaaaaatagaaaaaacatttatcgaaatcccaacaagttgacaaatatatccacataaaaatataaaacttctgtattctgtgaaagctactataaataaagtttagagaaagttatttgccacctatgtcatgattgaaatagttaattgatcctgtgaatcagttagcaaaacataactcaatggaaagataggcaaatgatacaaataagaaattcacaaaagaagaaatactaagtctctagtgatgagagaaatgtaaattaaaatgaaacatgtttgttcatcaagttgtcacaagttagacaatcatatccaatatttttaaaggttgtaagactataaggaaatagccactgtcatatcatttttaaaggaatataaattatagggccttttgtttctttgggttttttttttttagagacaagatctctccgtgttgtctaggctggactcaaacttctggactcaagcaatcctcgcaacatcattaatagctgagagtagagacttgagccaccacacctgactatagggcctttttgaaaggaaaattgacatcatcaaaattttaaatatattcagtctatttctcaaaaactcaaagaatactaataaatgtgtactcaggtatatgtacagaaattgctgtaacattataattttaaacaatttaaaacagactgagtttccaaagttagggtacaatgaaagaaaaggtggcttatttatactctggaatattttccaagagttgaaaaggatgaggatacacacacacacacacacacacacacacacacacacacacacacacagtttgggtatccctaatccagaaattcaaatgctccaaagtccaaaactttctgacccaccaacatgactgatgctcaaaggaaatggccactggaagatttcagattttcagatttggagtgctcaaccagtaagtatataatgcaaataatccaaaatacaaaaaaaaaaaaaaagaaatctgaaacacttctgatcccaagcatttcagaaaacggatgttcatttgtgtgtgtgtgtgtgtgtaagcaggtgttgctagaaattcacttatatacaagaaaactttttgtgtacatatttgcatatatatgtacaaatgggtagaaacgatacatgattaatcttaatcgggaaggaaaagagatttagggaaggaagcagtaagtgagaacttttattctatttactcctgcacgtttaaatattgtttacagtgagtatatcaacatgtaagtgttaaaagacaataagctactagtgatttttaatataaaattaactataaaatattttaaatattagcaaataatatagcacactcatgaacctaattcccacatttgatagttgttacattttgccatgtttgtttaaaggtctaagtcataaaatcttataaagctaaaccccacccttctctttctcctctctctccaggataattactgttttatagtttgtggatatcattcccttacttgtgtttatacttttaccaagtgtgtatgtattcaaaaaacagttgttttgtgattttaaaatgtaaatgaatggcgttatgctccatgtattctgcaacttttcatcatacattaggttttggcgatttagccataatttggcatgaattcaggtcttttaagttttattccattgtaagaataaacaagtttgttcattcatgtctc

SEQ ID NO: 1957 - DNA, 3433 bp, HOMO SAPIENS
ttgccggcgtctccgagcccgcgctcccagctgcagagcgcctggcttgcctcccgcgcggtcaccgccggcccgccgcccccgctcccgcccgcgcccggagcccctgcctcgcgcccgatggtgagcagtgtgttgtgccgctgtgtggcctccccgccgccggacgccgccgccaccgccgcctcttcgtctgcctcatcgccggcgtccgtgggggacccctgcggcggcgctatctgcgggggcccggaccaccggctgcgcctgtggagactctttcagacgctcgacgtcaaccgggacggcggcctgtgtgtcaacgacctggcggtggggctgcggcgcctgggactgcaccgcaccgagggcgagctccagaaaattgtacaagctggagataaggaccttgatgggcagctagactttgaagaatttgtccattatctccaagatcatgagaagaagctgaggctggtgtttaagagtttggacaaaaagaatgatggacgcattgacgcgcaggagatcatgcagtccctgcgggacttgggagtcaagatatctgaacagcaggcagaaaaaattctcaagagcatggataaaaacggcacgatgaccatcgactggaacgagtggagagactaccacctcctccaccccgtggaaaacatccccgagatcatcctctactggaagcattccacgatctttgatgtgggtgagaatctaacggtcccggatgagttcacagtggaggagaggcagacggggatgtggtggagacacctggtggcaggaggtggggcaggggccgtatccagaacctgcacggcccccctggacaggctcaaggtgctcatgcaggtccatgcctcccgcagcaacaacatgggcatcgttggtggcttcactcagatgattcgagaaggaggggccaggtcactctggcggggcaatggcatcaacgtcctcaaaattgcccccgaatcagccatcaaattcatggcctatgagcagatcaagcgccttgttggtagtgaccaggagactctgaggattcacgagaggcttgtggcagggtccttggcaggggccatcgcccagagcagcatctacccaatggaggtcctgaagacccggatggcgctgcggaagacaggccagtactcaggaatgctggactgcgccaggaggatcctggccagagagggggtggccgccttctacaaaggctatgtccccaacatgctgggcatcatcccctatgccggcatcgaccttgcagtctacgagacgctcaagaatgcctggctgcagcactatgcagtgaacagcgcggaccccggcgtgtttgtgctcctggcctgtggcaccatgtccagtacctgtggccagctggccagctaccccctggccctagtcaggacccggatgcaggcgcaagcctctattgagggcgctccggaggtgaccatgagcagcctcttcaaacatatcctgcggaccgagggggccttcgggctgtacagggggctggcccccaacttcatgaaggtcatcccagctgtgagcatcagctacgtggtctacgagaacctgaagatcaccctgggcgtgcagtcgcggtgacggggggagggccgcccggcagtggactcgctgatcctgggccgcagcctggggtgtgcagccatctcattctgtgaatgtgccaacactaagctgtctcgagccaagctgtgaaaaccctagacgcacccgcagggagggtggggagagctggcaggcccagggcttgtcctgctgaccccagcagaccctcctgttggttccagcgaagaccacaggcattccttagggtccagggtcagcaggctccgggctcacatgtgtaaggacaggacattttctgcagtgcctgccaatagcgagcttggagcctggaggccggcttagttcttccatttcacccttgcagccagctgttggccacggcccctgccctctggtctgccgtgcatctccctgtgccctcttgctgcctgcctgtctgctgaggtaaggtgggaggagggctacagcccacatcccaccccctcgtccaatcccataatccatgatgaaaggtgaggtcacgtggcctcccaggcctgacttcccaacctacagcattgacgccaacttggctgtgaaggaagaggaaaggatctggccttgtggtcactggcatctgagccctgctgatggctggggctctcgggcatgcttgggagtgcagggggctcgggctgcctggcctggctgcacagaaggcaagtgctggggctcatggtgctctgagctggcctggaccctgtcaggatgggccccacctcagaaccaaactcactgtccccactgtggcatgagggcagtggagcaccatgtttgagggcgaagggcagagcgtttgtgtgttctggggagggaaggaaaaggtgttggaggccttaattatggactgttgggaaaagggttttgtccagaaggacaagccggacaaatgagcgacttctgtgcttccagaggaagacgagggagcaggagcttggctgactgctcagagtctgttctgacgccctgggggttcctgtccaaccccagcaggggcgcagcgggaccagccccacattccacttgtgtcactgcttggaacctatttattttgtatttatttgaacagagttatgtcctaactatttttatagatttgtttaattaatagcttgtcattttcaagttcattttttattcatatttatgttcatggttgattgtaccttcccaagcccgcccagtgggatgggaggaggaggagaaggggggccttgggccgctgcagtcacatctgtccagagaaattccttttgggactggaggcagaaaagcggccagaaggcagcagccctggctcctttcctttggcaggttggggaagggcttgcccccagccttaggatttcagggtttgactgggggcgtggagagagagggaggaacctcaataaccttgaaggtggaatccagttatttcctgcgctgcgagggtttctttatttcactcttttctgaatgtcaaggcagtgaggtgcctctcactgtgaatttgtggtgggcgggggctggaggagagggtgggggactggctccgtccctcccagccttctgctgcccttgcttaacaatgccggccaactggcgacctcacggttgcacttccattccaccagaatgacctgatgaggaaatcttcaataggatgcaaagatcaatgcaaaaattgttatatatgaacatataactggagtcgtcaaaaagcaaattaagaaagaattggacgttagaagttgtcatttaaagcagccttctaataaagttgtttcaaagctga

SEQ ID NO: 1958 - DNA, 8339 bp, HOMO SAPIENS
ctgcggctggggctgggggcggcggcggcggcgacgcgggcggcgggcggcgcggggcggtccggcgggttcaaagaggaaaacatggcggaaaacaaaggcggcggcgaggctgagagcggcggcgggggcagcggcagcgcgccggtaactgccggggccgccgggcccgccgcgcaggaggcggagccgcctctcaccgcggtgctggtggaggaggaggaggaggaaggcggcagggccggcgctgagggcggcgcggccgggcccgacgacgggggggtggccgcggcctcctcgggctcggcccaggctgcttcatctcctgcggcctcagtgggcactggagttgccgggggcgcagtatcgacgccggctccagctccagcctcggctcccgctccgggtccctcggcagggccgcctcctggaccgccagcctcgctcctggacacctgcgccgtgtgtcagcagagcttgcagagccggcgtgaggcggagcccaagctgctgccctgtcttcactccttctgcctgcgctgcctgcccgagccggagcgccagctcagcgtgcccatcccggggggcagcaacggcgacatccagcaagttggtgtaatacggtgcccagtatgccgccaagaatgcagacagatagaccttgtggataattattttgtgaaagacacatctgaagctcctagcagttctgatgaaaaatcagaacaggtatgtactagttgtgaagacaatgcaagtgcagttggcttttgtgtagaatgtggagagtggctatgtaagacatgtatcgaagcacatcaaagagtaaaatttactaaagatcacttgatcaggaagaaagaagatgtctcagagtctgttggagcatctggtcaacgccctgttttctgccctgtacacaaacaagaacagttgaaacttttctgtgaaacatgtgatagattgacatgtagagactgtcagctattggaacacaaagaacataggtatcagtttttggaagaagcttttcaaaatcagaagggtgcaattgagaatctactggcgaaacttcttgagaagaagaattatgttcattttgcagctactcaggtgcagaataggataaaagaagtaaatgagactaacaaacgagtagaacaggaaattaaagtggccattttcacccttatcaatgaaattaataagaaaggaaaatctctcttacaacagctagagaatgttacaaaggaaagacagatgaagttactacagcagcagaatgacatcacaggcctttcccggcaggtgaagcatgttatgaacttcacaaattgggcaattgcaagtggcagcagcacagcactactatacagcaagcgactgattactttccagttgcgtcatattttgaaagcacggtgtgatcctgtccctgctgctaatggagcaatacgtttccattgtgatcccaccttctgggcaaagaatgtagtcaatttaggtaatctagtaatagagagtaaaccagctcctggttatactcctaatgttgtagttgggcaagttcctccagggacaaaccacattagtaaaacccctggacagattaacttagcacagcttcgactccagcacatgcaacaacaagtatatgcacagaaacatcagcagttgcaacagatgaggatgcagcaaccaccagcacctgtaccaactacaacaacaacaacacaacagcatcctagacaagcagcccctcagatgttacaacaacagcctcctcgattgatcagtgtgcaaacaatgcaaagaggcaacatgaactgtggagcttttcaagcccatcagatgagactggctcagaatgctgccagaataccagggatacccaggcacagcggccctcaatattccatgatgcagccacacctccaaagacaacactcaaacccagggcatgctggaccctttcccgtagtatcggtacacaacaccacaatcaacccaacgagccctactacagcaactatggcaaatgcaaaccgaggtcccaccagcccatctgttacagcaatagagctaatcccctcagttaccaatccagaaaaccttccatcgctgccagatattccacccatacagttggaagatgctggctcaagtagtttagataatctactaagtagatacatctcaggcagtcacctacccccacagcctacaagcaccatgaatccttctccaggtccctctgccctttctccgggatcatcaggtttatccaattctcacacacctgtgagacccccaagtacttctagtactggcagtcgaggcagctgtgggtcatcaggaagaactgctgagaagacaagtcttagtttcaaatctgatcaggtgaaggtcaagcaagaacctgggactgaagatgaaatatgtagcttttcaggaggtgtaaaacaagaaaaaacagaggatggcaggaggagtgcttgcatgttgagcagtcctgagagtagcttgacaccacctctctcaaccaacctgcatctagaaagtgaattggatgcattggcaagcctggaaaaccatgtgaaaattgaacctgcagatatgaatgaaagctgcaaacagtcagggctcagcagccttgttaatggaaagtccccaattcgaagcctcatgcacaggtcggcaaggattggaggagatggcaacaataaagatgatgacccaaatgaagactggtgtgctgtctgccaaaacggaggagatctcttgtgctgcgaaaaatgtccaaaggtctttcatctaacttgtcatgttccaacactacttagctttccaagtggggactggatatgcacattttgtagagatattggaaagccagaagttgaatatgattgtgataatttgcaacatagtaagaaggggaaaactgcgcaggggttaagccccgtggaccaaaggaaatgtgaacgtcttctgctttacctctattgccatgaattaagtattgaattccaggagcctgttcctgcttcgataccaaactactataaaattataaagaaaccaatggatttatccaccgtgaaaaagaagcttcagaaaaaacattcccaacactaccaaatcccggatgactttgtggccgatgtccgtttgatcttcaagaactgtgaaaggtttaatgaaatgatgaaagttgttcaagtttatgcagacacacaagagattaatttgaaggctgattcagaagtagctcaggcagggaaagcagttgcattgtactttgaagataaactcacagagatctactcagacaggaccttcgcacctttgccagagtttgagcaggaagaggatgatggtgaggtaactgaggactctgatgaagactttatacagccccgcagaaaacgcctaaagtcagatgagagaccagtacatataaagtaaaatgacatggatttaaatcaattgtttaaaaaaaaaaaaacgaaaaaaaaaaaaaaaacacaaaaaacccagaaaacttttaagtgttgctggaatatcctgcctacagtgggcacctccttgaagaagctgatagcttttacacagtattagattgaaataatggacagaaacacattcttgtcaagaaagggggagagaagtctgtttgcaagtttcaaagcaaaaagcaaaagtgaaatgatttgaggatttctgttctaatggagatgattctctgattgttagaaatggcaaatattgatgattgtgtgctattgattggtgcaggatacttggtatacgagtaaatacttgagactcgtgtcacttgataaattttctttttggactaggtcgcacagttattaaaacaacttttaaccctcccccttcacacacatacatatcaggttgttttctagttaaaaacccaagtagctcagattctactttaatgtcagtgcagatttgcattgaatcatgccattatgttttttctcatttttatgctgttgggtcttagtttttaaattgatataaagaactcagcaatggttttattttctactcatacttagggtttaggaaacactaccactagttatcatttaatcaacttcaatggtctactgaaacaaaaatggtaacttttcattagtggattatttagagttatagtagttgtttccagaaaacacttcctcacaattgtacttcccaatcaaatcatgtgatcatacagttattcccatgaaaggcagaatgtttgtttcaaaattaatctagttttctgtacatttaaatttgagaaggtgacaactggctcttttccagtcttccttcatgtcagttttctgatagaccactattggcaaacagtatctgtcaactaccaaatgtgtaaaattttctgtatttcactttgtcttatttgtaaatagtgaactaaaacttttggcagatcagcaacatttgctgagcctgttttttaagctaatgtgtattcttactaatgttcctatcaagaatggatttgtaatatatgctgtctatttctaatgttcacattcatattttgaggttctatcttattttaatagagaacagacttctcaaaaaatcttcagaagcagcttattattgaaatatcgaaatattgaaataaacccggtggggttagattactcatctgtccaccaagtgggacatttgcatggactgggggcttaaaggacttagaagagacctgtaagtaaatcctgaaaatgagccaatccccacttgaatggttactggagtaaacccacctttaccaccccaattacagcacccgaggccgataaaccaacttggctctggttcatttttcttttcttcatttgtgatgctcagattcaaaatgtgtgttctacactgttacaggcttctcttttgtttgattaaagattttagtcctacttttgtatggacacattagaatattcagagaccaaaatagaagaatttgctgttagatatttttcagaagtcagcagatttgtggcaaatcatttatttgcctttttaaaaattcatttaagcagttcagagagtagactactcagaaaattatttcacgtaattgtctaagaggtcaatattttttaatgcatattgaatcaaataaagtgctctaaagaaattattatacaaattcctttgggttgtttttcttttcttaacaaggggtgggggtaaacaggaatatgattcaggctttctggttgtgtatttaaagagtattgattttattattactattgatttactttattcctggcttccttttcacttttctttcaatttttaaaaaataatttaagccgttgaaaatataccaaactgttgaaacattttactcaaattttaaattcctaaaaatgttttttaataagagggagaaaattatttaaaaatacttatgcctatgccaatttccctcttttttcacaaaatccatgatttcagtttgtaagtagacatatatctaagggcacatttttggaaagtgaggaatagcagcagtataacttcattttgtcaggcctttgagttctaatattttgtattgctcttcaaatggatccttttaaaaaaattgtagataatgagtcataaatagattctgccaactgaggggagaaacattttaagtaaatatttttcagtatttggggccttaaaaaataattgtgtttccttaaaattacatgttagatagagtttttaggtttttttggttttaagattggttaaagcaatttaaaagccacttttttgtcaacatttaatagcctccacttctgttaagataatgtatactgctgaggaattactattaatagctatcaacataccaccattaaattaaggtattcactttagattttttattaaagcttttttcttgcacactgatcgttgtgtttctaagctgattttttcagctctaatatacctatggttaaaaagtataaaaacttaaattgatatttagatatatgttttcctattagtttatgttttaaaaagacaaaattgtatctgtcagtccctgaaggcagtttgtttttatactctctcacatttgtatttgttttttaaatggcagtattttagaagatttggagaaaagtccacataataatgttttcttaaaagcttttaaagtttttgctgtacttcaatttacttcttccatcagaaaactaagaacaaagtgttgctcagtctgttccgctgacctaaatttgtgttttcagcacttggctcagccaattcactgagtgaaggaattgctttatgaggcaaagcatgtgaaagttctaaagtatggttagattgtaggtcgtgctctatatggaaacatcaaaccattactacagagaaatgataaggcattggatccactattgaaattattatttttggatcaacaagttggtactttctgacttctgtatcttaacataagggaattttaggtaatgctaagtcagttgtctcattttttgtgataagttttggaatttttagttaattgaaataaataatgcttttaaatagaagtaaaaggtttataagtgtgcaaattgtagatttatcaattacctcagcaggtatcctgccatgtaattattagtgattagtgttaataagataatagattcaggtcttccaactatgcccttggattgtggcctactgtatgttattaaatggtctcttactatccaaaatgggagtagatgctgtggccccgtctcccttggcttttacgtcccatatccacccccattcatgtacaacatgtgaaatataaaaatctcatttcttgtcaaaatcagcactgcttatttgcatactcagcatcggatcagtgagtagttttataaaaaatccacgcacccaactcccttagttaaaacagattcttaattcataccatgaattcttaatttctgtaccatctatgttaatgatctgctgaaggtgactcaagattttcaaggtgtaatacagtttgatcatgtaccggacctggatatttaattttttttccctcacagttaatctcctccttgataaagcaataacactgctttgagtctgttgcctaatagcatgtcagaatcctctcctggatggtgattttataggaaagtttgtatgcatatcacccagtctatcttttaaaaattaagaaatttaaatgtatgctggaagtaatgacactatattgtggcattttattttaaaaattggggaaagttgcatatttttttaaaagtaagtgtttgagtaaaaaaattgaaggtacttttttaaggaaaaaaatttatatgccacagtttacatagacatttcagattcaacacgtactcttgaatataatggtttcttttacttggtcaaaatgcatgtatagcatttctttcatcttagttccttgtgtttgcctatgtggtcctttatatattttttattgtatcgaagaaacaaaactatcttcaaaaataagttaatttggatatatttgtcatatcaaactacaaagtgtacaaagttaagtttagcccttttctagaaagtgatctttaaaattaaaaatgctcctcttttaaattcaccaaatttatgtgtgggaaggcaccaaaatgattttgtaagtgccactgcaatattccctttcaagtgtggcctaaatttcaatcttaaggatggaatgcatgtctgctccttgttctgaaaaatgtaggcatctactacattttaaaacacagtgaaacatatacataagcctataaaaaaagatttgtgcaatttgaaagcctgttaattttttatgtagacatacctacacacgaaagggttaaattcacagccttactagttccttgcttccagtatttcaattggtctcctcccctcattattattattactactagtactattatttttgcacatagttaactgcccttcaatatgattcttaaaaagtgctgtttctgtggtatcgtattctctaaataatcatatttaattttttaaaacaaggttgcagtttctaattgtttcgttcctgtgtttttgctggtgtgtaataaaagcaagttttttcttttcatggttatttaatacattagctgcctgtaaataattcttgttataatgctctggaatgtgttgtagaagttgtattagattagttttaaacccttgtttgaaagccacattgttttggttatttctattaaattagaaaattgaaaaagttttcaaatgaa

SEQ ID NO: 1959 - DNA, 546 bp, HOMO SAPIENS
ttctgtctttttagtattcagggatattatgtaaagtttttcctgcactgaatctctgtgcttgagcctactgaaatgatccccctaagccatgctgcctgccttttgtgtttaatgtttttttacactgacttatctccttcgtgtgttcacctctcccccagaggaagacaacagaacagtataatttacagtttgtacaggttaaaaaaaaaaaaaaaaggttgtaagatgggggggtgatattttgttttaaaatatttgggtaaggaaaattttgtctttaatattaattctgtaatccttgaccaggcatggtggctcaaacctgtaatcccagcactttgggagaccgaggcgggcggatcgcatgaggccaggagttcgagaccagcctggccaacatggtgaaaccccgtatctactagaaatacaaaaaattacccaggcgtggtggtgcatgcctgtagttcccgctactccagaggctgaggcagaattgcttgaacccggaaagtggaggttgcagttagctgagaccacacc

SEQ ID NO: 1960 - DNA, 8911 bp, HOMO SAPIENS
ttggggagagctggtgagcaagagtctggcccgagttagctagagctgttgccatgacaagcattttcttaagaaagctctgctgttgagatcgtccaaagctgggggctgggagggggggcacgaacttcgtggggcaccatccctccgaagagagcaagatcagagacacccgcccagctctcctgcaccctttttctttcaggaacctgagaggtccttcccattggaggggcagggggaggagacccagcccactccccggccttagccagaaaggcaagagagcaaagccagcgtctctagcttggttgccacactggggagactggtgggtggtcaccccaccctaccctcatccatggaaacccggagggagagtcccgcctgaagaaacctggatctttgctagaaagagagagatccagttgtcatcggtatccaggaagctctcctcttcctcctcctgacgtctaccactacagttgctggttgttgctaaggttgctgccatggtaacatgcacatcctgtttacaccttcatctgggcaagttggtctaagctaggaacctacctaccctggacaaccactatcatcaccacctggggacaccaatcatcgtgacacggagtccaccttccactcagttcccccatcctcttcctcctctcgctgccagacttcatacggaagaaaggatctagacttcggacggctactcgggagcttattgcacaagatatattcaatctattccctcactgggcccccagagaagcaagaagtaggaagaagttgagacagggaggcaggagacactggtcagttgaagggaaacgctacatcttctctggttgaggggcttggtaacagcaggcaaaatgacgaacccatcagaccgtgtcttgcctgccaactcgatggccgagagccgtgaaggggactttggctgcacagtaatggaactgaggaagctcatggagctgcgttcaagggatgcactgacccagattaatgtccactatggaggtgtacagaatctctgcagtagactgaaaacctcccctgtggaaggtctgtctgggaaccctgcagatctggagaaacgtaggcaggtgtttggacacaacgtgatcccccccaaaaagcccaagactttcttagaattagtgtgggaagctcttcaagatgtcacgctcatcatcctggagattgcagccatcatctccctggtcctgtccttttatcgccctgctggtgaagaaaatgaactgtgtggtcaagtcgcaactaccccagaagatgaaaatgaggcacaagctggctggattgagggggcagccatccttttctcagtgatcatcgtggtgttagtgactgcctttaatgattggagcaaagagaagcaattccgggggctgcagtgccgcattgaacaggagcaaaagttctccatcatccgaaacggtcaactcatccagctccctgtggctgagattgtggttggtgatattgcccaagtcaaatacggtgatctgctgcctgcagatggaatcctgatccaagggaatgatctgaagattgatgagagctctctgacaggggaatctgaccatgtcaagaagtccctggacaaagaccccatgttgctctcagggacccatgtcatggaaggttctggccggatggtggtgacagctgttggtgtcaactctcagactggaatcatccttactctcttgggggtcaatgaggatgacgaaggggagaaaaagaagaaaggtaaaaaacaaggagtccctgaaaatcgcaacaaagcaaagacccaagacggagtggccctggaaatccagccactcaacagccaggagggaatcgacaatgaggaaaaggacaagaaggcagtcaaggtgcctaaaaaggagaagtcagtgctgcagggcaagctgactcgcctggctgttcagattgggaaagccggtctgctcatgtctgctctcacggttttcatcctgattctatactttgtgattgacaactttgtgataaatcgcagaccatggctccctgagtgtactcccatctacatccagtactttgtcaagttcttcatcatcggcatcactgtactggtggtggctgtgccagaggggctgcctctggctgtcaccatctcactggcctactctgtgaagaaaatgatgaaagacaataacctagtacggcacttggatgcttgtgagaccatgggcaacgccaccgccatctgctctgataagacaggcacgttgaccatgaaccgcatgactgtggtacaagcttatattgggggcatccattaccgtcaaatcccaagccctgatgtcttcctgcccaaagtcctggacctcattgtcaatggcatttctatcaacagtgcttatacctccaagattctgcctccagagaaggagggaggcctgcctcggcaggtgggcaacaagaccgagtgtgctctgctaggctttgtcacagatctgaagcaggattatcaggctgtgcgtaatgaagtgcccgaggagaagctctacaaggtgtacacctttaactcagtgcgcaagtcaatgagcaccgtcatcaggaatcccaacggtggcttccgtatgtacagcaagggcgcctctgagatcatcttgcgcaagtgtaatcgaatcctggaccggaaaggggaagcagtgccattcaagaataaagacagagatgatatggtacgcactgtcatcgagcccatggcctgtgatggactccggactatctgcatagcttaccgggacttcgatgacacagagccctcttgggacaatgagaatgagatcctcaccgaactgacctgtatcgcggtggtgggcattgaggaccctgtgcgcccagaggtgccagatgctattgccaaatgcaaacaagctggcattactgtcagaatggtgacaggtgacaacatcaacacagcccgggccattgccaccaaatgtggcattctgacacctggggatgacttcctgtgcttagaaggcaaagaattcaaccggctcatccgcaacgagaaaggcgaggtagagcaagaaaagctggacaagatctggcctaagcttcgggtcctggcgcgatcttctcccactgacaagcacaccctggtgaaaggcataattgacagcactgttggggaacaccggcaggtcgtggctgtcactggtgatggcacaaatgacgggcctgctctgaagaaagcggatgttggttttgccatgggcatcgcaggcacagatgtagcaaaggaggcttcagacatcatcctaacagatgacaacttcaccagcattgtgaaggcagtgatgtggggacgaaatgtctatgacagcatctccaagttcctgcagttccagctcactgtcaatgtggtggccgtgattgtagccttcactggagcctgtatcactcaggattccccattgaaagctgtgcagatgttgtgggttaatctgatcatggacacttttgcttcattggccctggccacagagccccctacggaatctctgttgaagcggcgcccctatggccgaaataagcctctgatctcacgcactatgatgaagaacatcttgggccatgcattctatcagctcattgtcatctttatccttgtctttgcgggtgagaaattctttgatattgatagtgggaggaaggcacctctacattcaccacccagccagcactataccattgtttttaacaccttcgtgctgatgcagctcttcaatgaaatcaactcccgaaagatccatggagagaagaacgtcttttcaggcatctaccgcaacattatcttctgctctgtagtcttgggcacattcatctgccagattttcatcgtggaatttgggggtaaacccttcagttgtacaagcctcagcctgtctcagtggctgtggtgtctcttcattgggattggagaacttctgtggggccagttcatctccgcaatacctacccgatccctgaagttcctgaaggaggctgggcatggcaccaccaaagaggagatcaccaaggatgccgagggactggatgagattgaccatgctgagatggagctgcgccgaggccagatcctctggttccggggcctgaaccgtatccagactcagatcgacgtaattaacacattccagacgggagcctcttttaagggagtcctaaggcgacagaacatgggtcaacaccttgatgtaaaacttgttcctagttcatcctatgtagcagttgcaccagtcaaatcttcccccaccacttctgttcctgctgtttcatctcctcctatgggcaatcaaagtggtcaaagcgttccatagttccctccacgaaagcattcagaaaccctacaaccaaaagtccatccacagcttcatgacccaccctgaattcgccatagaggaggagttgccacgaacaccactcctggatgaggaagaggaggaaaatcctgacaaggcttctaagtttgggactagggtgctcctgttggatggtgaggtcactccatatgccaatacaaacaacaatgcggtggattgcaaccaagtgcagctcccccagtcggacagctctctacagagcctagagacatcagtttgaattttctttctctgactctcatccctattttacctatttccattttcgtctatcccatctatgaggtgatgatgggacttttcattgtcacgtcagctgctgtgttaacagcagtgtgtgtgaagtgaacctctacctgaccatgaagaggcaagagcacagacttacaaggatttcaacttaagcttgacttggggtttgtagcgggacccagtcaaaccccattcaggtcatggtagaatctactccttggtagtcacttgtcatttttaaagaaatgatgacaatcctcttggcatcaccccaccccacattctccccgatgttcctctcctgaattctggattttgtcctacaagtctgtgccatttataagctaagttgagggttcagagggagacaaatatccccaagtgaaatatgttgcggtagagatggaatgtataaaatccgccagtagtgtgattgtttttcaatttttcccactttgaaaacttacacctaaaggcctgtaggcctctaactctttctgccctttcattcaaacctctccaaagttctttgtcttttgtcttcccttcctttccttttttttttttttttttatgatgattaagaaaatggaaaggatatggatgaattgtgtaaacttagatccttctcccttttggcccaaaagaacccttgatttagttccagaatccaaccagtttctttgttaaaagggtccttttgaagcaattaagtgctggtaagaatatttctctgttgttgccaggttaccttctgcttttaaattgccatcttgtaaagtgtatgtggttcttaagtgccagggagatcagccttgcccatgaaggttgcatatgtgtggtatacagtttttacctgaaagcctgagctttctcttattcctaaagtggtggcaaaagaatgaactgggtatgaccctgcccccttactgggcttggatattgaggaccagacgctgccaaatctaggacaagacagaccatcaaagcagacttttgtgggctcctctttggggtgaccactgctttcaaagccatctgccaaggctctccagggcaggacctgactggtggggaatgagtgttcagaagccttgggagaggccaaagagccattctagcatgatctgagaaaaccttcctgcagaggccagaaaccttgagcttaggtgcctggggaccagcttcgacattctctccagtttctgattctaatttttgccacgtgtcacaacttttccagtctctgagaaggtcccagcctttctcaaatattctgattttgaaaatatgtatccaaagtgggaggcccctgtgacattttgccaacttaaacgagaaaaagaccccccgcacccggcacactcccccttcctccagccccgcttcagccacatgctccagctgctgcccagtaaagccctgtgcctttttttcccctgaatactgcccaaagcatccccttcccatctgcctctcaggagttggggactttgctaggagattttttaagtgttccttactgggacaacgtggagccacgtttgcaggagctccatttgtatccctgctggtgttgacttctgtgtaggggccagttcatgtccctgactctcacctcccattagataaatgaagcccacccccctttctagagtgatgagagtcaagaagaggggatgtatgaacggccaaattcccatgtgagaggaagatgacctgatccacctagccttttcttctggatctgtcctccctcacccctttcacctgagctgtccacagtaggaaacataaagaaacaatgtcccctacatatccccatgactacataatccatcatcgtaggaaataggaaagcaaatttgattttggttttgtaaaacgtacatgcttcaataattcttttttgtgtcttaaatactcataggggaaaaaaacagctcacccaaggtgttaggtttcacatatatattcatcaactattttagaagatttaattctatcaaatcttgtattacctcagatcattttaaatagcaagccaataacgagctttgaaggctattttaccattcctgttcacaaaaggttctcatggtgcctgacaggttacccttgagggcttgtgtctactttttaaaagtcaatggttttttttcttgtgttctagtttccataataggagagaaaatatagaaatatatgcaaaaattatagttttctttagatcagaaactgatatttttgggtcagccatatgtattttgtttaaaggatttaaaataaagtgccgtcatgtagccctgtggaagggagcacataaccagctgtttggcatgacaggtgacttagtatatttgtaattggttttaaaaccaatacaccatactttctttctgcaaacagccatctttatacttagggaagaaaaattgttgggttctagacttttttaatataaattttgttgatatggaattaggtaagtttaagtgtctatgtgcatatgttttttatataagttttttctattcagtttcactgatccaactggcagtgggtaaatatggcataagttaataacacttttccccaaaatggtgctttggatttgaaaagggtctgatggggagaaggagaacgtatcatcctagcttcctctcttaataaacctagaaaaacgggtagtaaactgtggatagtcaggaaaacacccagcaagggacacagctgtcaggaaatgaatcttccccccaacccccaccatgcagatggatagacagaatctttcctgactagtcattaggatcaggggcctctgttggatttgtgtttcttgaagaatagctggcagagtggtataaaagacacgaatatctcctggtctataaggatactctgatttggggtttgcatttttcatggtttttatttcctgttccccctggagttttccattagtgagtttttgtgcaaggatcttatttgtgatgccttccctcccctagaaagattttgtgcaatatattaaatggggacagaattctaaatggataaaacaatggctggttctagccctgagtgacagtcttaaggctagatccttcccatagtatcatctgtcctctggaatgactctcctgtccctaaaggggttaagagagagatcacctagaaatccctctggacacttgtgggttctttagggtttgagtttcttcttccccttgagcttcagagaggagagttggcatggttaaatctgaatggttacctcactgctgaaaacccagaggggcgtggcacactcgcttgtgtggaaaagcctctaaatgcatcccttcctttctttcctgcttcctttgccttacaattgaagcagcccgtggtaccatcacagtatgcagagacttcctcacctttcatatctagggaccacccccgatgcattggtgagggtgggcacttataaatgcctgctattgttaagccattccagcctcttcctctgaatagaccagacgccctttcacttagttcagtgccagtccttttgccttcccaaccctgctgttaggcctgctgttccctttgctcttgattaggagagatggaaggagatgagctcccataactgaattggcctttggttcatgttttctccccatatgtatatatgccatatgtgaatatgccatatatatgtgccaacaaatctatctacgttgttcttttcaaattagcacgcagataggaattttgagtttcttcttcttttagtaactagtataacaagcactggtatttttgtacaaaaaagaaaaacaaaagattgactattgtggtctgcatgacataaacaaacaaatggtgatatcaaagcaacgtataccccagtccagtgtgtgttgccataatttgcaattcagcttaacagtgcacccaatctatatttgcattttgatattatttaagctctatgtacaaggttttgcatgtatttatatggttcttagggaaaaaaaatgctataaactgcaaatctgaaattcaaatgtgttgttccactgagaccagaagaagaagaggagttttaaaagggataatttgttggagccaataaagctttttgctgatgaacagaaaccaatactgctgtgcactgagaataaaaactcatgcccacttgtaaaaaa

SEQ ID NO: 1961 - DNA, 460 bp, HOMO SAPIENS
  misc_feature (95)..(95): n is a, c, g, or t
  misc_feature (280)..(284): n is a, c, g, or t
  misc_feature (286)..(286): n is a, c, g, or t
  misc_feature (288)..(289): n is a, c, g, or t
  misc_feature (291)..(291): n is a, c, g, or t
  misc_feature (293)..(296): n is a, c, g, or t
tactgtgtggccactggttatctttgaggatagctgttcatgccaaagcgttattttaacttttctctattactttatgatctatgaggccattnggggtctctctaagaacacagctcccatttataacactatttcaatagagaataagctctgaaaaaacactgttttgaataaagctcacatttcccagaaaatagccctagtgtgattcaaataggcatggcattgtgtagcgagaagccatgaaacctgtgggagcacgagctgagcacacagnnnnnancnngnannnngattcactggcaaagaccaaacttgaagctatagctctgggtacctctcaattatccctactggctgaggcaacactttaatggtagcctgaggcgccagccctgtgagacatttgacaactcacagcacaacaaccctcctatgagcgggattcctcgtctgg

SEQ ID NO: 1962 - DNA, 1864 bp, HOMO SAPIENS
ggccttcctctcccgcttccgcctggcgtaggagctgaggcatggccttgttctccagctgagaggacgatcgtccttataggagaggccgagtctccgagggcaatttcagaggtctggtgcgagggaagcagagactttcaaggaacaaggaaatgcatactatgccaagaaagattacaatgaagcttataattattatacaaaagccatagatatgtgtcctaaaaatgctagctattatggtaatcgagcagccaccttgatgatgcttggaaggttccgggaagctcttggagatgcacaacagtcagtgaggttggatgacagttttgtccggggacatctacgagagggcaagtgccacctctctctggggaatgccatggcagcatgtcgcagcttccagagagccctagaactggatcataaaaatgctcaggcacaacaagagttcaagaatgctaatgcagtcatggaatatgagaaaatagcagaaacagattttgagaagcgagattttcggaaggttgttttctgcatggaccgtgccctagaatttgcccctgcctgccatcgcttcaaaatcctcaaggcagaatgtttagcaatgctgggtcgttatccagaagcacagtctgtggctagtgacattctacgaatggattccaccaatgcagatgctctgtatgtacgaggtctttgcctttattacgaagattgtattgagaaggcagttcagtttttcgtacaggctctcaggatggctcctgaccacgagaaggcctgcattgcctgcagaaatgccaaagcactcaaagcaaagaaagaagatgggaataaagcatttaaggaaggaaattacaaactagcatatgaactgtacacagaagccctggggatagaccccaacaatataaaaacaaatgctaaactctactgtaatcggggtacggttaattccaagcttaggaaactagatgatgcaatagaagactgcacaaatgcagtgaagcttgatgacacttacataaaagcctacttgagaagagctcagtgttacatggacacagaacagtatgaagaagcagtacgagactatgaaaaagtataccagacagagaaaacaaaagaacacaaacagctcctaaaaaatgcgcagctggaactgaagaagagtaagaggaaagattactacaagattctaggagtggacaagaatgcctctgaggacgagatcaagaaagcttatcggaaacgggccttgatgcaccatccagatcggcatagtggagccagtgctgaggttcagaaggaggaggagaagaagttcaaggaagttggagaggcctttactatcctctctgatcccaagaaaaagactcgctatgacagtggacaggacctagatgaggagggcatgaatatgggtgattttgatccaaacaatatcttcaaggcattctttggcggtcctggcggcttcagctttgaagcatctggtccagggaatttcttttttcaatttggctaatgaagggcaaccacccagaacccagaaaatgcagattcactcagtttaatcttgaatgtggaaacagttcacctcctcccttcatcacgtctccgtgtgcttagagcagtttcgttttctcagttggatgccctgtgtctctgtgagtggggtggagcaaagggaaccaatgccgaagaccgagggcaggggagggaggcgggggtggacagggaggcagcttgtgaatttttgttttactgtttaactttattaaaaaagaaaaaaaaaagagaataaaatgttttgacccttcctggccctttgctctggaaaaaaaaaaaaaaaaaa

SEQ ID NO: 1963 - DNA, 12267 bp, HOMO SAPIENS
cttctccatgcccaccctttctctgccatcctgcatcctcttcaactctctattgaaaaatgaacaaatgttcagaacagaggaagtagagtggtggcaccatcaaaggcaggaagggccaggagaacctgatgggagcggggatacagacctggttctagcttccagtcttccagtcactaactttctgctgtgtgcagggcacaatggaagtaaacaccacccactatatatcccctgtgcctggcatacagaatcattcacacatgttgaccgaagggtttcctttgcttctaggggattatgtatcattttgggaggaagcatgtattctgtgaggttgtttagtttatgtccaagcgccatttactaatgtatccctgctctttgctttcggtatgtatgttcttcctccacctgacaattgtgcccccaatggtggccaggcagcagcataccaaagagatgtgctgcaagatttcagaggtgggtgagtgagacatgggaaagtggactcaggtcttgaaagagtcaggagtggccagggcaaagaacatgaactggtgctggaatgaaggattctgggaaggttgtggagacctggctggtagctagagcagagatgatggaatccaaggaaacaacttctctccggtgaatcaagatttcttcagtggacacttagtcccagctctgatagcccttacccctgtttcctgccacagtgtgggtcatatgtattctttatcatatgaggagagtgctaattaatgtgtcatttattttgtgagcatgctaatacatatattcatattccaatttagtgaaaaaaaactgatctagagatgccccttttcgaggtgacagcatggctctggagagatggccacaggaaccatggcagtggaccaggttgctgggagaaggcaaaaggggaggcacccaagctgagaaggggctaagcactcagcccctgggaccaccaacagcaggcctgagacacatgcaggaaaccagacagcctggatgaaatttctttcaagcaaggccagtggtccctgacagaacaccagaggtttccccctaaatcctttcgcatctgtaccatttccatcttagttggagctctttgttctcatccttgcaatacgcagagaaaaaaaaatcacaggttgttgattgtttgaagatagggtattgctctgtcactcaggctggagtgcagtagcatgatcacggctcactgcagcctcgaacatccgggctcaagtgattctcccacgtcagcctctggtgtagttgggaccaaaggtgtgccaccacagaggcagggttttgccattttgcccagaatggtctcaaactcctgagctcaagggatcagcctgcctaggcttcccaaagtgctgggactacaggcatgagacaccttgcccagccaaccagagttctttttgatgccgatattttactcggactccacatctaggtaggaattcatgttttcaagtacggacattgctctacacaatcctctcctttcctgatcactaaattagagtaaatcactgtcctgaagaaggtacccttgggagagtgggttggcctgtctttccaccctttcttgactctgccctcaccttcaagcctctttctggcctgtgttcaaggtccagaggcatgcttaagacctctctgtgtggctcttcttgaagagtcaggaaccccatacttcctgttcagcgggcagagaagcttcaagccgcacagttttgggtatgctaggatcccacaaggcacagatgtgcagtggcccacgaagtgagtttgtgggtctccagttacctgcagccctttctgctcctgtaggttaaagggcaattgcctttttttttctgtccaggaaggaccccagaatgttctgagtcagaaagacagtgaatcctctcctctgggtcagtggggagggagagagagagatttcagagggaagaaagcagaaaaagatgtcacaaaattgcctaatcaaaagttaccatgatgcctgcctcatctggaactgggctcccagtctctagtgagggagacatagtccagtccagtcccagtctccagtctgagccaaagcagaacaaagctggacactgcagcctggcatccaacgaacattttgtcactttccccagggtgggagcatttgaactttggatgtgaaggaaacatggtaaccactgcagtaagaagagcaactgctggagaaaatggcactttcttccccaaatttgtttttacactcatgtctaaggaacaccttagaaaccacattaacatctttcagcaaaaggaaattctgcctgttgatcttttgctgtgagacaaacttgaaaagttcacagacactgcctttctctgaaaactgcccttacctctttgttataattcacttcaagatctgttgagtaggaacatcaaaaatgcaaataaaaagtttcaagtattatgaaagaatgcaataaaactgcctttaaaaaaaatctcaagatggaggtggagatcctgtgatcatgaaatctgaataggctgctcttgtgtccttcagtggtgatggctctgaaacccttgtgttttatgaacttcatgccctggtcttcaaacgaattcagtgcaggccaagaagcacagtttggcctgggttggatgctctatattttcaaagagtgaaatgtcttgagacacagcctttgctatagtacctgctaaaacttcaacgtgtggataaatatagcttacattgaatcgaatagactcagcgagagtggcagtgaaggatgccctctggaagattcgaggtgctgaggccaaagggctagcaaggaaagagcgtgcgggtcaggcccttcaacctggtggaagagcaggcagggagggtcctatggttcctgggaggacccgaagcatgatcgcctgtcaagagccaagagccctaatggccagcgccggggaaagggcccccgaggggcagtcagcagccctgcaggggcggcgttcacactcctgtgtggcacgggacactcatggctccaccagctcctgaagcttctgggagccagagagtcagcagggagaatcccacacacgggcactcagttcctggaaaccctgcatgagatgcgggatcccgaagccagattgggggtccctagggtcttggcttcggggctaggcgcggaaccgtaaatgagggttcagcctgtctgcctgagggattgtgtttcctgccgtatttatcactcaaattttgaaaagcagtcgaatttgttatattggaaaccctagtagttaaaaacagcagatggtaacatttcaggaatatgtcttgtgccaggaactgtgaggggtttctgtagtgtagtgattacatgttcgcttcacatgtgaaaggtctcaggtttgggacctttcatcatcaacatgatgaaaccccgtctccagtaaaaatacaaaaattagccaggcgtggtggtgcatgcctgtaatcccagctcctcgggaggctgaggcaggagaattgcttaattccaagaggtagatgttgcggtgagctgagattgtgccattgcactccagcctaggcagcaagagtgagactacgtcttaaaaaaaaaaaaaagaaagaaagaaaagaaaacagaggactttaaaaccgttattatgtcaatattctatgggtccaaagaattaagcagaggtatcaaacatataaaaatggtcagaatcaaactttggagattaaaaactacaacatctgagataataaattcactggatgcaattaacagcagattagacactgcagaaaaaaagattatgaaacacaaagccgccgggcaccgtggctcaggcctgtaatcccagcactttgggaggcggaggcgggtggatcacgatgtccagagatagagcccatcctggctaaaacagtgagacccccgtctttacaaaaaaaaaaaaaaaaaaaaaaaaaaatatatatatatatatatatatatatatatatatatatatatatataaattagctggacatggtggcgggcgcctgtagtcccagctaatcgggaacctgaggcaggagaatggcatgaacccgggaggcggagcttgcagtgagccgagatggtgccactgcaccccagcctgggcgacagagcaagactccctctaaaaaaaaaaaaaaaaaaaaaaaaaaaaaccgcactgaggggaaaagtcaatgtgaaattctacaaaagctgaaaattcactaccaccagccattaccacaaaaaaaaaaaaaagttgaaggagtcctccaggcagaacgaaactgacatcggatgaaaatctggttgtacaaaaaaaaaaaaaaaaaaaactagacatgacatctaatagacgaatatataattttaacatctgactgtttagctgggcgtggtggctcacgcctgtaatcccagcactttgggaagctgaggcaggcagatcacttgaggtcaggtggttgagaccagcttggccaatatggtgaacccctctctctactaaaaatacaaaaattagtccggtgtggtggcccacgcctgtaatctctgctactcaggagtctgagtcaggacaatcgcttgaacccgggaagcagaggttgcagtgagccaagattgttccactgcactccagcctatctggaacctagtttgatctggagggatcttattttataggaggcttggagggggaccttttgctttgtgtacttataggatgcacaagacacaagggaacaatctctcactttttaaatacagtgataggcctgaggagaaacaactgcaattttttttttttttttttttttaatgagatgggattctcactggtcttgaactgagctcaggcgaggcttcccctacgtcggcctctcaaagtgttgggattaataggcgtgagccaccgcgcctgaccacaactaaccaacatttaaaagcacgtccctgggtaggctcgaaccaccaactttccggttaacagccgaacgcgctaaccaattgctccacggagataacctcagttggtcgctttcatctcaacatagattaagcaatcactaaactctaggggttgccattcgctttctgcaggacaactgtgcagactacaaagcttcggaaaaccggagaggctgagtcgactaatcgtgttgttgcacgttagaaacgcttgcattgcctgactctgaaaccagaagggcggccgaatggccttcaccctccattaaccctcgcctccttcagaagccagtgcctctggaaatgcctggatctgcgaccccagcctgagcctagtagggcccaagggaagctgaacgccccgacggctctcatggtaggtagctctttctgtttttttgcgccgccttcaggcaatcatctactccgcttgctatcccctcactcaactcggcttcagtagatggggttggtggggcgggagtgggaaagaggcaggggagtcaaaagggaaaacctgaaaagaaggagggagaagaagcaggggagaccaggacgagacaatgggacagcccaggatgccggtgcagagggcagcggctggatgcagagaagatgggacacgtatcagaatggactggagaagacgtgagggaaaatcacaagaacctgtagctgcccaagaataaacacgtaaaaatcgcataaatgtttttacattaaaaaaaaaatcgggagaccgggcgcagtggctcacgcctgtaatcccagcactttgggaggccgaggtgggtggatcactcacttgaagtcaggagttcgagaccagccgggccaacatggtgaaagcccgtctctactaaaaatacaaaaattagctgggtgtggtggcgacgcttgtagtcccagctactcaggaggctgaggcaggagaatcgcttgaacctgagaggcagaggtggcagtgagccgagatcgcgccactgccctccagcctgggcgacaaagcgaaattctgtctctcaaaaaaaatgcataaataaataaaagaggggtggggaagcaaaacgacgggcagtaggtgtggggcgcattgggattctatagtggttagtaccctgccttgtgcctgcagcaacctctgttctaatctgaatcctggtacagtcagactctatcttggacccactggggcgaacccacgagtcttttggtttgcttttaattcctgcaccagctgcggcctttatctgcagccagaaagcagggtttaccgctggccccacagcgccatacggtctggggaaaagaaggaaacccaatagtacacaaacaaaggcccaaagagaaaccttccaagtgctctatgcctcacggtttagcagaaaatatcaagcaactctcaacctagctggtctgtagcttccacaaatgaaatactgtattcattgcagcctttctggttgagatatttcaaatatttggtggagcttttaatgagacggagagacactctcgagtgtggaagaaaaacatgagggggtgtgaggataaggcgactttaggacagaaaaaacaaagagacaaggaagccacgtaaacgttttcgggtaggcgtgaggcgatgtcagttttgaaccccgtttatgttaggtagagagcgcagccctcttctagcacaaacaccgtttcccacattgaagaaatcacagagatcagcaactctagagtgcgatgaagaagcttcactctgggagaacccccttcgtgaccacggtctctttcctgccaggtaagtgggaatgagcgcatgccctgcagggacagcacagcgtcctcgccctggtcggacgctcagggtcaccaccctacccactgcccccttcgccattcttccaaaccactctctgccaaagattccaccgacagtcaccccacacgacaacccaggccgcctttcagcagtggctcccgccccgcaaccacgcgccctctcacccccgcggttctgcccgccgcctctgtccagtctgtgcacttcacctccctggctcccgctctcccctgagcttacagtggacgcggggttcttccaaacccctcttgggaatactgaatggaaaagggggagcgtgcgcaagtgcttggtagagtgtagacattgtgggatttgactgtggtaccatcgctttgacgtcctagtgctgatttttacacctgcattctgcttagggcactggcaacagttttccgtttgtgcctactccacctgctgtctttgttgggtcagcgaacatcgcctccctctaccgctcaatcagcaaaagggaccgcccttgaggacctcacccgccgctcactcccctcccaacttcgcgggcatcgcctccggtcgcctcttccgaaggcctaacgagcatgttagctgcgaacggaggtgaggaggctccgctgactgaccggtgcccacgtccagggcacgcacaaacgccatgacttggcttggcctctctcttagttattcacagctcagcccgataggcacctctggggcggcgacggcaaagagggtgcgcttattaagtgcagctccacggggactggcctctctgcacggctgtgtacacctgagcgagacgctcagtcgctctctaaagccgcttctgcggatgacagacacggagataaacgtgagaggtggcccaccacgacttgccctcctttgcccgggtttgcccctcgctgcggaggctgttctacatctggcccttggagcaggccggctgacagcgtggtaaaggaagatttctgcgggagggcggccagtgcaaaacaattccctgaccgggaatcgaacccgggccgtggctctttcagcaccgaatcctagccactagacaaccatgcagatgcggaaagctgctttctctcccttcttcgacctgaagcgacactttcctgtgctctaggaggacttgggtcttgtgagagtcgccctttgctcctggagtcgtctcacaaggccgttcactccctgctttcttcaaaaaaagaacctgcaggcgacacaccaaggactccacgagggagtcctgagtactggagcgagttgcggccacgcggccgcagctcaccactggcctagagatgccctttgcgaggcggcagcaactgacaagatggtcgcgggtcgccgggtccggagccgcccaccaggttgccaggaggaggcgggagcggggaggcgcccgaggtgagacaggggcaccctctgcatcataaaggacccagaccccggcaccctcaacatcataaggaatcagacggatgcggaaaccgagacgggctggataggaaactctttccaggaaggctccggggcactcaactggtctccaaccttcccctgcaacctgtgacgcctgccattttcccattttaggcgatggcaacgcaacccctccgtttgctctgggcaaaacttcgagagttccctctgaagctggagctttttcctcagatccaagatccaattggtcaccaattcgtgatttccgtcggccaagtgcgtgggcattgatctacacgcgagtttctccacctctgccgaatggctacttcggggtgggggaggggccctcccgccgtggattgcaaggtgtttagcagcatctgtctcctccgctgactagacacatgccagggggataacattctccctcccgcttcccccagccgcggcctagtgtcccagcggggttgggagaggcatgtgagggcgaagttgccccctgttgagaaccattgctgcgcgtagtccttctctctgaacttgtgcagaggactctccaggtgaaggctcaagggtggatccagctcgagacaccctcgctccccctcacagtcggaccttaggatttaggctttaacatctccacatcatgagattcgaaacctttaggtcttgtcttccgttctgtcctccaaatcggcctcttccgagcctgttgaccagggccagccgggcagagggctgggctcgctcaacgaggctcctctcgcacctcctggagcttcaggcttctttccgttgcagagaagctttatgggccaattcgttcggcatccccgggggcaggtgcgcggtgcgcggggaagaagaggatttgactgcggttctccacccccggcgcccaacctccaccccggtgcgcgcgctcttccaggctcctgctggtcccacttgccaggagttaggtctcaggtcagcctgagctcctgagacgcccaggcccggaaagacacgtaggggaaaccatctgctcacttctgtcctgtccggaagggatccctttctgacgggaaagaaaggcggtgagtcctgtcctgttgagtaggcggaagagagatcaaagggaagacaagaaaaatcctgtgagttttcaggatctaaagttaccatgaggtcgacctaacctcctctggaggtcctcccggtcctcccgtggctgtcgaaggtgaatctagcttccgtctccagttcgccaaggcggacaaagccgacgacaatgggcctgtccactatcttctttcatatgcacaaaatgtcagctcttcttgtttctaacttgcaacatcccacctgatgaccagctcagcaaattagagaccctccatgggattccatctctgtcttagttcgggcttccataactatataccataaactgggtggctaattcacgacagaaatttatttctcacagttctggaggttggaagtccgagatcaaggtgccaacatggtagggttatgatgagggacttttttctggttgtagactgccaccttctcattgtatcctcagggggcagagagagctccctggggtcccttttatagtggcattagtcccactcagactaacgggactaaatccagacccagttattgcaatgtgtgcaaaagaacaaggacttgtactatctgacttcaaggcttactataagctattacagacaaggcatcaggagggacaaatagataaacagactgagttaagagacctgaaactgatccacagccatacagtcaataaatgagctttcaatgaaagcagttcaatagaagaaaataaatcatttcaattaatggactttcatatggaggtgggggagaccaacaatgttattctccctcacactacatacaaaagtaatttgaggtgcattatacaccaaaacttaaaagttaaagatataaagcatttcaaggatactctgtaggtaaagattagcctaccaacaagtaggacactgaaaaaatatatataaaagacatgataaattagacttcatcaacattagccataccttctcatcaaaagataccactaagaaagtgaaaaggcaagcaagccacagacagagagaaaatagtcacaaaacgtatctgacctccacatcctgtaattagaattattgtggtctggtacactgcacccagtttctgcaggagtactttctgggtgtctctaatgagtaagagagggccccatgggatattcctacagttcccagatgaacagtgggaaagactctacgttgacaaaccccggggacctgaaaactcaggtcctcaaggagggtagaggatacctggaccctgacccagacccctagatgggctgtgccaagagacccagcaagggaagggattccctcctgcctcaggttctctgttcttctgtggttagaagacctgaacccaactccctctccaagcagtggagatagggcttttccaagggctggggatcttgctgtcctaaggacagctgagcaagggggtcgaggaggagcttgggtggtggaggagaggaaaccgggtaagatgtgtgaagcagtcggctataccaggcacagagaggacccactgggacacaagagcctgcatgtgaagccaggccttgggccaccttgttcctcaaaggggtgcttacttccatgggatcttcaaagggactgtggaaagagaagccttcagcccacacctctgaatgcttttccaccacagcatgccctgtggcctgtatcctgctggtgtggaacagtcagacccctgcagggctgcagagcctctgtactgggcggcatcccagcctgagtgccagagctcagtgggcaggcccccgagcaagcagagaggagggcaccttttggacagaacctgtgggacaagagcgacgtctcatcctttcaggttcctcacaaaatgacagtcaggaagatcagggtgcagacctgatttcccacgaagggctgaaagcagacaaccggagggagagcagcacctgggccaatgaggtagaagacagaagaccacagtgtacttctgccctcaacctcaccccctcccacctacatcctccacaccccctgaccaccttcttcagaaacgtaataggaatcaagatcccccctggcctggttgctatgggaggcacagtggcctgatggagcctgaggcaggtgtgggaagatgtggattgtctaactggaggttgggagtccagggtgcagaaggagaagcttggagtgcaggatttggtggtatgtgtgtggcagtaggcactatgttctaattgccagtttttttttcttcttcctttttttctctagctaaacaagcactggccttgagataagcaatgctgaagcacttgcagctcacctattaccataaactgactgagccctccctacacaagccgtaactactgctttgattggacaagagactgatttcagtagttttctcttgataagagaccactggccgtgggcgggttctggacagtttacagaagctatgcacttgattgcctttgtgtccctgcttcaccttttgaagcatagggcctaattataatgtatttaaatgttgtctccaccccaaagtgaacatgggttgcatgtaacaggcatgtttactcagcatgcatgcagcaggatcccttcacaaatattcagagctccccctattccctgttgaatatgtatatgtggccagccagatcaacgtaaatcactattcgccctcccctccctggaaacctacttttcgggtttcagcaggaagctatgcctccccgtctgtcagaatggccacttgcaggctgtaaccctttataaaaaaataaaatctcctttctaaattt

SEQ ID NO: 1964 - DNA, 1326 bp, HOMO SAPIENS
ccgcccctctgccccagtcactgagccgccgccgaggattcagcagcctcccccttgagccccctcgcttcccgacgttccgttcccccctgcccgccttctcccgccaccgccgccgccgccttccgcaggccgtttccaccgaggaaaaggaatcgtatcgtatgtccgctatccagaacctccactctttcgacccctttgctgatgcaagtaagggtgatgacctgcttcctgctggcactgaggattatatccatataagaattcaacagagaaacggcaggaagacccttactactgtccaagggatcgctgatgattacgataaaaagaaactagtgaaggcgtttaagaaaaagtttgcctgcaatggtactgtaattgagcatccggaatatggagaagtaattcagctacagggtgaccaacgcaagaacatatgccagttcctcgtagagattggactggctaaggacgatcagctgaaggttcatgggttttaagtgcttgtggctcactgaagcttaagtgaggatttccttgcaatgagtagaatttcccttctctcccttgtcacaggtttaaaaacctcacagcttgtataatgtaaccatttggggtccgcttttaacttggactagtgtaactccttcatgcaataaactgaaaagagccatgctgtctagtcttgaagtccctcatttaaacagaggtcaagcaataggcgcctggcagtgtcaagcctgaaaccaagcaataccgtcatgtttcagccaagcccagagccctaagattacaaacaactatggccggaacctcctcagctctccctctgcagagttccctaccctaagagaatgttaccacctgaacagtcctcggtgaatctgagaggagaggatggggtaaggcagaagcaccagctgtactactagaagggagcttttggtggtagatcccctggtgtctccaacctgactaggtggacagagctcaaagaggccctcttaccgctagcgaggtgataggacatctggcttgccacaaaggtctgttcgaccagacatatcctagctaagggatgtccaaacatcagaatgtgaggccaaccttctatcagagttaaacttttgacaagggaacaaatctcaaactgatccatcagtcatgtagctagctgtagagcttgcaacttaatagcagcagctgcccaatgccatgtgaagtaacaaactggtttttggtttttttttccccttcagttttaatgttatgtgtaatgtatttaaacccttatttaaataaaacttgttttcagaaata

SEQ ID NO: 1965 - DNA, 865 bp, HOMO SAPIENS; identical to SEQ ID NO: 1654

SEQ ID NO: 1966 - DNA, 3963 bp, HOMO SAPIENS
ggtcgggaggggcgggaactggggagtttcgccaatcggtgcagactccggttctccccaaccccgggcctgggcagctgggcactggggcgccgttccccacccggcgcggacttcggaaccggccctgggactgactggctctaccactcgagcgcgtctccgctggacccggaaccccggtcggtccattccccgcgaagatgcgcgccctggcggccctgagcgcgcccccgaacgagcggctccttccccgggaccccgcggctacccgggaccccgacgccgcgcggccggcgcgcaggagcgcagtggagaggctggcggcggatcgcgccaagtatgtgcggggtcggccggggactggccggggcgtcgcttccgagggcagcggcccgggggcgatcaagtgcccggggaacgaccctgggcccccggcccgcgccccggccccggtggcgcgcagggctattgcgcggaagccgttgagaccggactcgctgatcatctaccggcagaaatgcgaattcgtgcgaggatcgggcgccgacggccccagggcaagcctggtgaagaagctcttccaggggccgggtaaggacaaggcgccggtgccccggacgggagacgagggcaaggccgggaacccggagacggtcccgaccactcctggccccgcggcggaccccgcaatccccgagaccccagccccagccgcgcggtccgcggcgccctccagtgtcccggccgcgccccctgggccagagccgcgggtggtgaggcgtcgggggctgcagcgctcacagtcggacctcagctcccgctattccgctgccttggccgagtctgacaccttcttccagtactgcggcctggaccccgaggtggtggaggccctggggagggagaacttcaccgcggggtcggactgtgtgaccctcaaggtgcgcagcgtgagcgtcgccacctccggcagcggcttctcccggcacagcggcggcgacgacgaggggctgcaggaggaggagctgatagagcaggtgcccagcaccacttcggtcatcgagaggaacgcccgcatcatcaagtggctgtacacctgtaagaaggccaaggagacccccagccaggagcagagccggacccgaggaagcaaaccttcccgatgatgaagacttcttgaaggatttcatgggtgatttgggatcccaggaccatttggctagtgtgcctaggtgaccacatgattgctgttttaccaggaatgcagcatcccattgacaaaacaagtgctctgagaaggtttaaaatactacagagaatatgggaacacagaccttgaaatttagctgagttgtaacagctgaaactccaagaggtgtcttccttgtttgaggtgaaactagtgttgcttccagagggcagctggaaaccgtaaagctgtttggaaatctttttgactgacttgctgacaaagaggtactgtgatgcattttaacaatatctaagttgatttttttttaaatcaaggaaaataaaaaccaagcatgaatgctatggtatgtgccccttttgaccatcctgggctgattaacatcatttaaatcaaagtaatcataaaaaggcatattctacttcaattatgtggtcaaataagagtaaacacacacactcacacatgctgaccccaattgccagagcattactgcactataaattacggttaattcccaaattatactactgtttatcttatttaacaagtcagaaagcacttttaaaataacttgagggctacaaggtcattctattaatgtcattctccattcgggttgtaggcatgtggaagtacccattaaaagataagttagagtttaaatactgataaacaaaaccttttattgcaactggacagtttctggagagttagcggaagaatcttggagtttcctttggtcagatgaatacaacatttcacttttgcagcactatttagaatgtactccatggttctcttgttcccaacttccaaaaagaacagaaaactttggtttacacagaacacgggcatctgaggcaggacctcttccctgccctttgatctgactcacacctccacatatgacgtaatcaacccaaatttgacaccaattcactcttttctgcaaagggcatattttgaaacaagggacagcctgagggcggctataatgagaatgttcatgggggttactgggtccctaattctgaacttgcttatgacacccagagtgaatagattcagattcagaaccttctgagaaataacccaaagaaaatttgttacccagccaattcttcgaaagcttaatatcaaaatatatcttttcaagaagaaaatcgttagagagaagaatgtggaggggagagaaatgggtttctcattgatatgatattttgttaaccatttcattttgaattattcaagttttggttaatattgtattcttttttcgtaactattttaccgtgagagtaggtcattgggttacttagatatttatttttacacagttattagtcttcagatagttttattttacttcatatgattttagtttttgtcagtataattttaaatcatgtttttcttggtcatctctttgtgtatattgtgtaattggattttcattgactgcaagtggagtgtttgccactcaattcagtactcagtactatggtgacttgttttcaaataagtctcagatacacatttagggagcctttgctggccgaatatagactctgtcaggacagcaggtcccctgatctaagaattttccccaatggttgctctaaaaatgctgctattttgctgttcactgtattgcacttagttaaaaagaagataatgtgaaagatgagagcagttttttaaaggatcttttcatatacccaattcccttattttcagatgtcccatcaattttagatatgaaagctttaagtaaaagtgtgtatgcctttctactgtcagaacaggatggatgcagcctgggtcagatttatttaagataaaaatcatgcagactcatcattcatatcataggtgaaaaatgtaaaaaccaaatggtttccactaaagccaccaagatcttttagaaatgtttgcacctttggtggtggcacaggaaaagagaagaattcagctggagtgaattctagaagtagatatcagaaacggggcatgaagaacaggggaactgggtggcatcagactcctaaagaagtgagttaattttccttcccttccattcagattcatgccacagctccatatcttgagtatgtgtaagaggtgagttccttcttcagccaggggcggtggctcatgcctttaatcccaatgctttgggaggccaaggtgggaggatcacttgtgccttggggttcaaggttgcagtgaaccatgattgcaccactgcactccagcctgagtgacagagcaagaccctgtctctaaaaatatatataaaaagtaaaactaaagaacttcttgcctaaacctgaattaccgcaatttgctgagtgactttgagaaaaatcagactgtttagttcagtcgggatgaaaagcttgcgattgcttcccacaagaatgggcaatagtgacggctgcaaggtacttttatttgttcatgaaagaacgacaatttttcaaaatgtaattaaacataatagaatgttttaaactactgggcactgaaactggaagaaaaaggaggctttattgaacattcccctttttcagttggttcaaagttcagcactgtggttatcattggtgatgccagaaaacattagtagacttagacaattgctatggcagtttctaaacagagctttttctatacactatttgcaactggagtgcaatattgtatattctgtgttaaagaaataaagtatttttatcatttattaa

SEQ ID NO: 1967 - DNA, 389 bp, HOMO SAPIENS
ttttctatgctttacctgctatggaaaatttgacacattctgctttactcttttgtttataggtgaatcacagaatgtatttttatgtattctgtagttcaatagccatggctgtttacttcatttaatttatttagcataaagacattatgaaaaggcctaaacatgagcttcacttccccactaactaattagcatctgttatttcttaaccgtaatgcctaggcctaacctcaaccaaccttccacaatcttgttcacagtcagagacccaaaaaagagtgttataagtggggtgtcactattgtgaaagtagtgctaatggtgttgaattggtacctatgattcttcttttgaattagattgtatgtttcatgatctcaacttac

SEQ ID NO: 1968 - DNA, 405 bp, HOMO SAPIENS
catgtcccagcttctgaggggagcaaggactagacgcttcacagcctggagcttcctctttattcatcctctgtctggtggagttggaaagtcgggaacatacacatggagaccaaaagcagagataagtcaaaggatggaaatactgcagagaacctgctcactgttcagaaagtagatattttatacttatttgtgtatttaatttgaaactgaaaatatacacaaatatattttttaaagtagaaatctctccttactggtcactcactatccatactgttctcctcacagcaaatgtctggtatgtccttccaaagatgttttctgttgtaggcatatcaatattttcacaaatggtattcagtaaatgctattttgtagcccagaaaatcatattgtctt

SEQ ID NO: 1969 - DNA, 3223 bp, HOMO SAPIENS; identical to SEQ ID NO: 932

SEQ ID NO: 1970 - DNA, 458 bp, HOMO SAPIENS
  misc_feature (89)..(89): n is a, c, g, or t
ggagagatctggaatgaagcttcaagatacagtattacagaagaaaggaaaagatatagactatacatcgaaaagttttcgcaaaaatnggaataatgaaaggagagggaaagttacatgtatagcagaagcagtattttaaaaggaaatgatacctaaaccatagattctcgaagttgtacacattgcaaggaagataaacaaaaagaaatctacacctaactacatcataataaaactgcaagaaaccaacgaaaataggaaagtctaaaagcagccacaagggaaaaaaaatacgttcagaaaagtaatgattagactaacagctgacttcacaacagaaacaatagaatctactaactgcaaacctagaattttgttaaatttagcaaaaatactttccaggaatgaagatgaaataaggagggaattaattaacagtgtaccagctgaaggaa

SEQ ID NO: 1971 - DNA, 3577 bp, HOMO SAPIENS
gccaaagcgttacttccggcggaaaaggacgcgggagattcgattggaaggctgccggcgtgctactgagttcggccggtccgagtcactgtgcgtcgcctgggcccgttcctggtcttctcccccagggtcttgctctgtcacccaggctggagtgccatggcatcatcatagctcactatggccttgatcctcctgccttagcctcccaagcagctggtattacagaccacggtgtgaacacatgaacagaagacgaaaatttcttctagcctcagtacttgctctccagaattcaagttttatatatccatcatgtcagaagtgcttctctaggataatcctggtctccaaaaggtctaattgtccaaaatgtggctctactggtgaatctggaaatgccaattacagatacaaactttccttaaaagttgcagaatcaaacaaattgtttgttattactgtatttggaagttgcttagatacattttttggtcttactgccactggtttgcacaggtacattcaggatcctaataaaattccagaaacactggacaatgatacaactcagaatctattaactaaagcagttgaaacttgctttgttggacaaagctttatttttggagtgacgaattttgaaaaccaacctggacaaggttcagatgccagtaacttcttacagcaatgctctgaccacaaaagaaaagccaaagcactagtggcttgccagattgttctaccagacccaggtattgcaggctttactgtcattgactacttccatcaacttttgcagacttttaatttcaggaaacttcagtgtgactctcaggcacctaacaatcacttacttgctttagatcactcaaatagtgatctcagcagcatatatacttctgacagcacttctgattttttcaagtcctgcagcaaggatactttttcaaaattctggcagccatcacttgaattcacttgcattgtttcacaactaacagataatgatgatttttcagcttcagaacaaagtaaggcctttggtactcttcagcagaacagaaagtccatctccattgcagaggccactggttccagtagctgccatgatcccattcaggattcatggagccttgtttcatatatggataaaaagagtacagcagaaaagttgggtaaagaacttggcttacaagctaaggagctgagtgcagttcacagcagtcatcatgaaattggagttaatgactctaatttattctctttggaaatgcgagagccccttgagtcaagtaatacaaaatccttccacagtgcagtggaaattaaaaataggtcccagcatgagctaccatgttttcagcatcatggtatagataccccaactagccttcagaagagatctgcatgttgtccaccttcgttactcagacttgaagagacagccagcagttcccaggatggtgaccctcaaatttgggatgatctgccattctctgaaagcctgaacaagtttctggcagttcttgaaagtgagattgctgtaacccaggcagatgtcagtagtaggaaacatcatgtagataatgacattgataaatttcatgcagaccacagcaggttatctgtgactccccagagaactactggagccctgcatacaccacctatagctttaagatcatcacaagtaatagtcaaagcaaactgtagcaaagatgacttccttttcaactgtaaaggaaatctaagtcctagtgttgaaaaggagtcacaaccagataacaaagtagaggctgtctctgtaaatcataatggaagagatatgtcagaatattttttaccgaatccttacctgtcagctctgtcttcatcttcaaaagatttagaaacaatagttactcttaagaagactatcagaatctcaccacacagggagagtgaccattctagtctaaataacaaatatttgaatggatgtggagaaatatcagtttcagaaatgaatgaaaagttgacaactctgtgttataggaagtataatgatgtctctgatctttgcaaattagaaaataaacaatattgtaggtggtccaagaaccaagatgacagttttacaatttgcaggaaacttacatatcctttagaaactctttgcaatagtccaaatagaagtacaaatacattgaaagaaatgccttggggacatatcaataacaacgtaacacagagctattctattggttatgaaggtagctatgatgcctctgctgatctctttgatgatattgctaaagaaatggacattgcaactgagattaccaaaaaatcacaggatattttgttaaaatggggaacatctttggcagaaagtcacccttcagagtctgatttttcactgagatcactttctgaagacttcatccagccttcacaaaaattatccttgcaaagcctatctgactctaggcattcaagaacatgctctccaacacctcattttcaatcagattcagaatataattttgaaaatagtcaagactttgttccatgttcacagtcaactccaatttcagggttccaccaaacaagaattcatgggataaacagagctttcaaaaaacctgtattttattcagatcttgatggtaactatgaaaaaataaggattttccctgaaaatgacaaacagcaagccagcccaagctgtccaaaaaatataaaaacacctagccagaaaatcagaagccctattgtatctggtgtttcacaaccagacgttttcaatcactacccttttgctgagtgccatgaaactgatagtgatgaatgggtccctcctaccacacaaaaaatatttccttcagatatgcttggattccaaggcataggtctagggaaatgccttgctgcctatcatttccctgatcaacaagagttaccaagaaagaaactgaaacatattagacaaggaaccaataaaggtttaattaagaagaaattaaagaatatgcttgcagcagttgttacgaaaaagaaaactcataaatataactgtaaaagttcaggctggatttccaaatgtccagacattcaagtcttagcagcacctcagctgcaccctattcttggacctgattcttgttcagaagtcaaatgttgccttccattttcagaaaaaggcccaccttcagtgtgtgaaactcgaagtgcttggtcacctgaattgttttcataaaaagtcacctgaacccaattcctgaacttttaaatctgtttggaaatgtttgccttcaggggtacggaaagcattctttacattttgaacacttggagagaagcaaattgaaaacaggactctgctgggagctactgtgccttttaaaatataaagccattgttttccccagggttttatctagaatactatgattaggtagttgagcactttatcttatactgtttattgtactttaataatattgttaagattgtttttgaaagtattaatgtttgttaaaatcacatatacatccagaaataaagactttgcaaaccaaaaaaaaaaaaaaaa

SEQ ID NO: 1972 - DNA, 4530 bp, HOMO SAPIENS
ctcctttccgtggtgtgtagccggcttggcgtgaccctcgcctgatccagttgttagagttggaagcttggcagttggcctcccttcttcccatggaggacgggggcttaacagcctttgaagaggaccagagatgcctttcccagagcctccccttgccagtgtcagcagagggcccagctgcacagaccactgctgagcccagcaggtcgttttcctcagcccacagacacctgagcagaaggaatgggctttccagactctgccagagcaggacagcgctctctgaagacagatggagctcctattgtctatcatcactggctgcccagaatatttgtacaagtaaactgcactgccctgctgcccctgagcacacggacccgtccgaaccgcggggcagtgtgtcctgctgctccctgctgcggggactgtcctcagggtggtcctcacctctgcttccggcccctgtgtgcaaccctaacaaggccatcttcacggtggatgccaagaccacagagatcctggttgctaacgacaaagcttgcgggctcctggggtacagcagccaggacctgattggccagaagctcacgcagttctttctgaggtcagattctgatgtggtggaggccctcagcgaggagcacatggaggccgacggccacgctgcggtggtgtttggcacggtggtggacatcatcagccgtagtggggagaagattccagtgtctgtgtggatgaagaggatgcggcaggagcgccgcctatgctgcgtggtggtcctggagcccgtggagagggtctcgacctgggtcgctttccagagcgatggcaccgtcacgtcatgtgacagtctctttgctcatcttcacgggtacgtgtctggggaggacgtggctgggcagcatatcacagacctgatcccttctgtgcagctccctccttctggccagcacatcccaaagaatctcaagattcagaggtctgttggaagagccagggacggtaccaccttccctctgagcttaaagctgaaatcccaacccagcagcgaggaggcgaccaccggtgaggcggcccctgtgagcggctaccgggcatctgtctgggtgttctgcaccatcagtggcctcatcaccctcctgccggatgggaccatccacggcatcaaccacagcttcgcgctgacactgtttggttacggaaagacggagctcctgggcaagaatatcactttcctgattcctggtttctacagctacatggaccttgcgtacaacagctcattacagctcccagacctggccagctgcctggacgtcggcaatgagagtgggtgtggggagagaaccttggacccgtggcagggccaggacccagctgaggggggccaggatccaaggattaatgtcgtgcttgctggtggccacgttgtgccccgagatgagatccggaagctgatggaaagccaagacatcttcaccgggactcagactgagctgattgctggaggccagctcctttcctgcctctcacctcagcctgctccaggggtggacaatgtcccagaaggaagcctgccagtgcacggtgaacaggcgctgcccaaggaccagcaaatcactgccttggggagagaggaacctgtggcaatagagagccccggacaggatcttctgggagaaagcaggtctgaaccagtggatgtgaagccatttgcttcctgcgaagattctgaagctccagtcccagctgaggatgggggcagtgatgctggcatgtgtggcctgtgtcagaaggcccagctagagcggatgggagtcagtggtcccagcggttcagacctttgggctggggctgccgtggccaagccccaggccaagggtcagctggcggggggcagcctcctgatgcactgcccttgctatgggagtgaatggggcttgtggtggcgaagccaggacttggcccccagcccctctgggatggcaggcctctcgtttgggacacctactctagatgagccgtggctgggagtggaaaacgaccgagaagagctgcagacctgcttgattaaggagcagctgtcccagttgagccttgcaggagccctggatgtcccccacgccgaactcgttccgacagagtgccaggctgtcaccgctcctgtgtcgtcctgcgatctgggaggcagagacctgtgcggtggctgcacgggcagctcctcagcctgctatgccttggccacggacctccctgggggcctggaagcagtggaggcccaggaggttgatgtgaattcgttttcctggaacctcaaggaactctttttcagtgaccagacagaccaaacgtcatcaaattgttcctgtgctacgtctgaactcagagagacaccctcttccttggcagtgggctccgatccagatgtaggcagtctccaggaacaggggtcgtgtgtcctggatgacagggagctgttactactgaccggcacctgtgttgaccttggccaaggccgacggttccgggagagctgtgtgggacatgatccaacagaaccgcttgaggtttgtttggtgtcctctgagcattatgcagcaagcgacagagaaagcccaggacacgttccttccacgttggatgctggccctgaggacacgtgcccatcagcagaggagccaaggctgaacgtccaggtcacctccacgcccgtgatcgtgatgcgcggggctgctggcctgcagcgggagatccaggagggtgcctactccgggagctgctaccatcgagatggcttacggctgagtatacagtttgaggtgaggcgggtggagctccagggccccacacctctgttctgctgctggctggtgaaagacctcctccacagccaacgcgactcagccgccaggacccgcctgttccttgccagcctgcccggctccacccactctaccgctgctgagctcaccggacccagcctggtggaagtgctcagagccagaccctggtttgaggagccccccaaggctgtggaactggaggggttggcggcctgtgagggcgagtactcccaaaagtacagtaccatgagcccgctgggcagtggggccttcggcttcgtgtggactgctgtggacaaggaaaaaaacaaggaggtggtggtgaagtttattaagaaggagaaggtcttggaggattgttggattgaggatcccaaacttgggaaagttactttagagatcgcaattctatccagggtggagcacgccaatatcatcaaggtattggatatatttgaaaaccaagggttcttccagcttgtgatggagaagcacggctccggcctagacctcttcgctttcatcgaccgccaccccaggctggatgagcccctggcgagctacatcttccgacaactagtgtcagcagtgggatacctgcgcttgaaggacatcatccaccgtgacatcaaggatgagaacatcgtgatcgccgaggacttcacaatcaagctgatagactttggctcggccgcctacttggaaaggggaaaattattttatactttttgtgggaccatcgagtactgtgcaccggaagttctcatggggaatccctacagagggccggagctggagatgtggtctctgggagtcactctgtacacgctggtctttgaggagaaccccttctgtgagctggaggagaccgtggaggctgccatacacccgccatacctggtgtccaaagaactcatgagccttgtgtctgggctgctgcagccagtccctgagagacgcaccaccttggagaagctggtgacagacccgtgggtaacacagcctgtgaatcttgctgactatacatgggaagaggtgtttcgagtaaacaagccagaaagtggagttctgtccgctgcgagcctggagatggggaacaggagcctgagtgatgtggcccaggctcaggagctttgtgggggccccgttccaggcgaggctcctaatggccaaggctgtttgcatcccggggatccccgtctgctgaccagctaaacaccaatttcttcctgcttttctccacttggtttggaaaatcacacagttttcaggctccatctgtttggagaaaatacattctgaagcatccccaattcaccttctaaaaactcatgtgcaggtttgataaacaccagaacagaagacagtgatgctgtattattttagatttattacatagatttggaattcacttttttcatgacctagaaaaaaacattccagtgttcaactgttttatattattaaagggcttttaatttgtgaacttctgaaggcatgagtgttttctctttctacttttgtatatgtgcatgttttgtttcctctgacttggtatatgctcatctgagtgacggatatgtgaaatttgtagaactggttagtcaaatggccagactatttcattaatttatttcctcaaatgcttttcaaattaaagcacctttgttagtaaacagtt

SEQ ID NO: 1973 - DNA, 2747 bp, HOMO SAPIENS
agacactctccaaaaagcagagacagcaggaagaggggagtggaggcagcccattcacctggggaaatgactgggttgtcgatggacggtggcggcagccccaagggggacgtggacccgttctactatggtaagcctgggcccctgcgcacccttcctgagccctcaggaccccttccaccaagcagcggcctctcccagccccaggtccatgctctgtgccccttatctcccctggttaccacgggctgctgcgggcaggctgcggagagagacagctgctgggagagaccacccatcccgctcctcttgccctctctttccggagactatgagaccgttcgcaatgggggcctgatcttcgctggactggccttcatcgtggggctcctcatcctcctcagtaagtggggtggcctccagggaaggggtgctgaccagggcacctctcttctcaaggccgctgagcaggctggctttcgggagttgccaagggaggggtgagcctccccaccacgccccccactgcaggatgtgggaatgggtgcccggtggggtgccaggctcgctgggagcacagtgtgaggttcctgcttgctcaagtgcaccctccagtgggcccgggaggagccgcagaagtgagagcaaacccacggggtaactgggtaaccggagggccagacagggggactaggccccccgctgctaaccatggtcccaaactcatttgttaaatagggatgatcccacctgcctcacaagattagggctagcatccaaagacatggcagtcaggacagcgctctgagaacggtccagtgcagactcggagtgttctgggggagacaaagagagttatgtatcctcaagccccgaggggcacacagcaggagcttaataactgcacattgacttgttttggtccaacccaaagaaaaatacacagaaaacacaacccatggaaagaagatacagcaagcacacctgtgggctctggacttctaatgcacgtgtgccactgccaccccaccccaaggctcgggccacagtcctgcgggtctccccattttcccgtgttgcccatggcagctctctctacgtgtgccactgccagcccaccccaaggctcgggccacagtcctgcaggtctccccattttcacatgttgcccgtggcagctcccggagggcagtgccgggtggcagctgatcacataggcacaggaggcaggtggcctaagcaaggggctccactttggagttgctgccatccttctccaggtgttcatcgggcagctgtgctgggggcaccatgatggcccagtctctgctgctactctcgatatgccaacagaccaccgtggatctgctccagtaaatatttgctgactgactgactgacttaggttcttaaatgcctatggtccagccttatataaagagagagaaggctgggcgtggtggctcatgcctgtaatgccggcatattaggaggccaaggcaggaggatctcttgagaccaggagtttaagaccagcctggtcaatacagtgagacccgatctatacaaaaaaaaatttttttaattagctgggcatggtgacatgtacctatagtcccagctacttgggaggctgaggcaggaggattacttgagcccaggagtttgaggctgcagtgagctacgatcccaccactgcactccagcctgggtgacagagtaagaccccgtctcaaaaaataaaataaaataaaatataaaataaaatagagacagtcaaacgtggcctccaagcctgaccctgcgatgatactggcaggagggaggtaggagagactggaagaattttgagtcttccagggtctccttggaaaattagtccatggaaacaaatctccttttctcttttcaaggcagaagattccgctgtgggggcaataagaagcgcaggtgagcgctgcctggggtgaccgatgagggggttggggctggagaaggaggggcgggctgaggattttgtctctgacacagtggaggatccccagcctcagagatccctagacccacccctccccctgccctctcacctgttgcttttccttcccccaccaggcaaatcaatgaagatgagccgtaacagcaggtatgctaggagggcctggggaaggtgcggggagggcagggcaggcttgggagcaacagggaagaattctggctcctggactcggtaaataagaattttagggtcgtccacacatcagccaggtggtctgtcacccatcgtgtgtttaaaatgatggccaagggcctggcgtggagtgtgtgccgcaggagatcacagaggagccctggagaaaagtgagatggacaagggggaagtaaaaccccaacctctgctgcctcccacccaaccccatcctgcctttgtcttctcagcctcggcggtgccacccactgcactggggccagctgggaagccaagcatggccctgcctctggcgcctccccttcttccctgggctttagacctttgtccccgtcactgccagcgcttgggctgaaggaagctccagactcaatgtgacccccaggtggcatcgccaactcctgcctcgtgccacctcatgcttataataaagccggcgtcagagaccgctgcttccctcacctgcctgcctgtctccctcctctgtcaccaccagcctctccaagctcaagtacaaatacagccgggaaaaaaaaaaaaa

SEQ ID NO: 1974 - DNA, 3968 bp, HOMO SAPIENS
aagggcgaggggcggggcctgcgtcgcgctgcgggcacgtcgccgcgcgtcttcagtatttaatgtctctgtgttccacccgcctgggctagcacgtgggggagctgcggaagcgcggcgctgcgggccgggccgcggggcacagccgggggccggcggcggcgcgcggactccgcatcccgcaccccgatggtagccgaggagctggtgtaattacttcaagcctccaggatggcaatccagttccgttcgctcttccccttggcattgcctgggatgctggcgctcctcggctggtggtggtttttctctcgtaaaaaaggccatgtcagcagccatgatgagcagcaggtggaggctggtgctgtgcagctgagggctgaccctgccatcaaggaacctctccccgtggaagacgtctgtcccaaagtagtgtccacaccccccagtgtcacagagcctccagaaaaggaactgtccaccgtgagcaagctgcctgcagagcccccagcattgctccagacacacccaccttgccgaagatcagagtcctcgggcattcttcctaacaccacagacatgagattgcgaccaggaacacgcagagatgacagtacaaagctggagctagccctgacaggtggtgaagccaaatcgattcctctagagtgccccctttcatccccaaagggtgtactattctccagcaaatcagctgaggtgtgtaagcaagattcccccttcagcagggtgccaaggaaggtccagccaggctaccccgtagtccccgcagagaagcgtagctctggggagagggcaagagagacaggtggggccgaagggactggtgatgccgtgttgggggaaaaggtgcttgaagaagctctgttgtctcgggagcatgtcttggaattggagaacagcaagggccccagcctggcctctttagagggggaagaagataaggggaagagcagctcatcccaggtggtggggccagtgcaggaggaagagtatgtagcagagaagttgccaagtaggttcatcgagtcggctcacacagagctggcaaaggacgatgcggcgccagcacccccagtcgcagacgccaaagcccaggatagaggtgtcgagggagaactgggcaatgaggagagcttggatagaaatgaggagggcttggatagaaatgaggagggcttggatagaaatgaggagagcttggatagaaatgaggagggcttggatagaaatgaggagattaagcgggctgccttccagataatctcccaagtgatctcagaagcaaccgaacaggtgctggccaccacggttggcaaggttgcaggtcgtgtgtgtcaggccagtcagctccaagggcagaaggaagagagctgtgtcccagttcaccagaaaactgtcttgggcccagacactgcggagcctgccacagcagaggcagctgttgccccgccggatgctggcctccccttgccaggcctaccagcagagggctcaccaccaccaaagacctacgtgagctgcctgaagagccttctgtccagccccaccaaggacagtaagccaaatatctctgcacaccacatctccctggcctcctgcctggcactgaccacccccagtgaagagttgccggaccgggcaggcatcctggtggaagatgccacctgtgtcacctgcatgtcagacagcagccaaagtgtccctttggtggcttctccaggacactgctcagattctttcagcacttcagggcttgaagactcttgcacagagaccagctcgagccccagggacaaggccatcaccccgccactgccagaaagtactgtgcccttcagcaatggggtgctgaagggggagttgtcagacttgggggctgaggatggatggaccatggatgcggaagcagatcattcaggaggttctgacaggaacagcatggattccgtggatagctgttgcagtctcaagaagactgagagcttccaaaatgcccaggcaggctccaaccctaagaaggtcgacctcatcatctgggagatcgaggtgccaaagcacttagtcggtcggctaattggcaagcaggggcgctatgtgagttttctgaagcaaacatctggtgccaagatctacatttcaaccctgccttacacccagagcgtccagatctgccacatagaaggctctcaacatcatgtagacaaagcgctgaacttgattgggaagaagttcaaagagctgaacctcaccaatatctacgctcccccattgccttcactggcactgccttctctgccgatgacatcctggctcatgctgcctgatggcatcaccgtggaggtcattgtggtcaaccaggtcaatgccgggcacctgttcgtgcagcagcacacacaccctaccttccacgcgctgcgcagcctcgaccagcagatgtacctctgttactctcagcctggaatccccaccttgcccaccccagtggaaataacggtcatctgtgccgcccctggtgcggacggggcctggtggcgagcccaagtggttgcctcctacgaggagaccaacgaagtggagattcgatacgtggactacggcggatataagagggtgaaagtagacgtgctccggcaaatcaggtctgactttgtcaccctgccgtttcagggagcagaagtccttctggacagtgtgatgcccctgtcagacgatgaccagttttcaccggaagcagatgccgccatgagcgagatgacggggaatacagcactgcttgctcaggtgacaagttacagtccaactggtcttcctctgattcagctgtggagtgtggttggagatgaagtggtgttgataaaccggtccctggtggagcgaggccttgcccagtgggtagacagctactacacaagcctttgacccccatgctgcttcctgagagtctttttttgcactgttgaaattgggcttggcactcaagtcaaagatgaacatcggaataacaaacattgtcctctccagaaagtcctttctttctccatactgtagtcctattgagaagacatttcgtctctgagaaaaaaggatggaactatgggttctcttcgcaaagccaaaggatagtgtttaacaagccagctggcttatgctggttctcagctgtttaaaaaaaaaaaaaaaaaggaatagaaacagtttcaaccagattgtcctattccccctgttccattcccctcttcttccttctatctccttccccggcaaaaaccaaacaaactggcagacaggccagggatgtatgttgcttgcttgagagggtttcttttacttcaaaatctttcttcagggagcaagacatgaactgactaattggtatccactacttgtacagcttacataaatgagttgatgatatttaaccagtttttataaacttcatttaggtctctaaacacagactttttaaattgcaactgtaaatatgaaatggtcatcacatctgaccttggtcagtggggaggggaactggtatcctgccaagcctggttgtaatttgtaaccattttctatttgtgcaaactctgtaaatatgtgtttaaacaaatgtaatattttgtacaagatacactggagaacaaagggaactcaagattcttccagccacatgtcacctgtaggtagaagtaaactctgcagtgcagcttctgctcttggcccctctggccagggcccctgtggcttcctgcacactggacaggtgactgtatggtagagactgtgatctgggaactttttgctgtacaaatctgtttaaaaaaaaaaaaaagtaactcattgaattaacttgcagtggtgtgtttgattcttttttagactggcttcagcattgtgcagtttaaaaataagtaagtaacttacataaatcttcaattgtatgaactgca

SEQ ID NO: 1975 - DNA, 1926 bp, HOMO SAPIENS; identical to SEQ ID NO: 490

SEQ ID NO: 1976 - DNA, 1210 bp, HOMO SAPIENS
gattggttgttcccttttcggctctgcaacaccgcctagaccgaccggatacacgggtagggcttccgctttacccgtctccctcctggcgcttgtcctcctctcccagtcggcaccacagcggtggctgccgggcgtggtgtcggtgggtcggttggtttttgtctcaccgttggtgtccgtgccgttcagttgcccgccatggctgagctggatccgttcggcgcccctgccggcgcccctggcggtcccgcgctggggaacggagtggccggcgccggcgaagaagacccggctgcggccttcttggcgcagcaagagagcgagattgcgggcatcgagaacgacgaggccttcgccatcctggacggcggcgcccccgggccccagccgcacggcgagccgccggggggtccggatgctgttgatggagtaatgaatggtgaatactaccaggaaagtaatggtccaacagacagttatgcagctatttcacaagtggatcgattgcagtcagagcctgaaagtatccgtaaatggagagaagaacaaatggaacgcttggaagcccttgatgccaattctcggaagcaagaagcagagtggaaagaaaaggcaataaaggagctagaagaatggtatgcaagacaggacgagcagctacagaaaacaaaagcaaacaacagggtggcagatgaagctttctacaaacaacccttcgctgacgtgattggttatgtggcagcagaagaagcctttgtaaatgacattgacgagtcgtccccaggcactgagtgggaacgggtggcccggctgtgtgactttaaccccaagtctagcaagcaggccaaagatgtctcccgcatgcgctcagtcctcatctccctcaagcaggccccgctggtgcactgaagagccaccctgtggaaacactacatctgcaatatcttaatcctactcagtgaagctcttcacagtcattggattaattatgttgagttcttttggaccaaacctttttgtctttagagttgttcattgtttgtgattgcatgtttccttccttcaactgtgttctccctggcattcagagaggagggagaggaggaagaggaaggggagggaagcttcccaagagtagcctcaacctgtgcttctgtgcattattctgagaataaatttctgtttcaaactgtattaaaaaaaaaaa

SEQ ID NO: 1977 - DNA, 2472 bp, HOMO SAPIENS; identical to SEQ ID NO: 1390

SEQ ID NO: 1978 - DNA, 2216 bp, HOMO SAPIENS
aaaagaacaaaagagagagcttgacacaccaatcttgaggtgttgtgccattctctgggaacatacagatgaaatgacctgaaccctgcccaccatttaaccaaaaaaggaagtggaatggaataaaatcccccaatacagtacaattatacattaatggctgtaatgtgaagagcatcacacacgaagagagccatcttccagaaataagtttatacactctctcctctaattgcatcaggactttaccagataatgttcttccagatctgaaaaggaaaatgcttaaaagagcttccaaactcatttttgaataatactaggctacaaagaattacactgtgaattcattaagggtaacaccaaaccactaaacagcactgtttgtacagaaatgtcgaaaagctgtggaaataatttagcggccatttctgtaggaatttcgcttcttttactcttagtggtttgtggaattgggtgtgtttggcactggaaacaccgtgttgccacacgatttaccttaccgaggtttttacaaaggagaagcagcaggagaaaagtctgtactaaaacattcttgggcccccgcatcattggcttaaggcatgaaatctcagttgaaacccaagaccacaaatctgctgtcaggggaaataacacacacgacaactatgaaaatgtggaagcaggtcctcccaaagctaaaggaaaaaccgataaggaactatatgaaaacacagggcagtctaatttcgaggagcatatctatggaaatgagacatcttctgactattataacttccagaagcctcgtccttctgaagttcctcaagatgaagatatatacattcttccagattcatattagcttttcaaaatattgacttttgttattgggtgataaatattcactgtaatttttcaacagcaaagacaaggaatcaaactaaatgttgatcaactgtagactggataaagaaaatgtggtacacatacaccatagaatattatgcagccgtaaaaaaagaacaaaactaacatgggaacagaaaatcaaataccacatattctcacttaaaagtgggagctaaataataagaacacatggagagaaggagaggaacaacagacactggggcctacttgagggaggacagtggaaggagggagaggttcagggaaaaaaaaaatatcaggtactatgcttagtacacacatgatgaaataatctgtacaccaaacccccaagtcacaagtgttcctacataacaaacctgaacatgtacccctgaacataaaattataattaaaatattaaaaataattcactgtgatttttatggtactgatgccattcttaatcaagttctgataagtggatggtctctgcctatctccacctttctgaatcctatgtgtatcactgtggattaattctagatatcttctccaccctccttgcaccagactaaatctgtattatgtgatattgattcttccttctaaatattacccgttatctctttcctttatttctaccattatctttatctggctcagaattattgtcataggctcctaactgttcctcctgcttctagtttctacccactcaatcaattaccgatggtgttgccagatttatcttcagaaaatattcctaacagccacattatttctttcacttaaaatgttttaatgccccctctttgcaaaagacataatacccataatttgaactccaaaatttatggttttccacaattggttccaattcacttttccagtgacttctcttactatctctcatttctttgccttcagcagaatcatcttaaaacctgccaaacttatccttccttcacagctttgcttttctgcctcttctctcaagcctgcttcagatcataagttcttccacacatctcctgaatcactccaaacccgcatttacctttttattttctgatataagctttgatgcctcttcaattcttaggacatttaaacatatgaatgttgccacagcattttattacctagcttcatatgaaaatgtcttaaattcccacctaaatgaaaagaaactgcccaaatgcctagaacatcacataaggcactaaatgcctcatgttttactgacgggaattgaattgtacattttgctgagtagttttgagaaaaaaatctaataaattcatctgttattcatccat

SEQ ID NO: 1979 - DNA, 3431 bp, HOMO SAPIENS
gccgcgcggcgcgggggaggagaccttcatctgttcacgcggtagcgcggattgcggttcgcggcgcgcgccaccggggaaggagcggtgggccgaggggttggaggtggggccccaggaggacctcgggctgtgggccgggagagcggagtcggggagtggggcgggggagcgaggtggcgccggggagcctgggatatggcgcggccagacgatgaggagggggcggcggtggcgcccggacacccgctcgcgaaaggatacctcccgttgccgaggggcgcgcccgttgggaaggagagcgtggagctgcagaacgggcccaaagcgggcaccttcccggtgaatggggccccccgggacagcctcgctgccgcctcgggagttctgggcgggcctcagactccactggccccagaagaggagacccaggcccggctgctgcctgcgggcgcgggagctgagaccccgggggccgagagcagcccgctgccccttacggcgctctccccgcggcgcttcgtggtgctcctgatcttcagcctgtactcgctggtcaacgcctttcagtggatccagtacagcatcattagcaacgtcttcgagggcttctacggtgtcaccttgctgcacatcgactggctgtccatggtgtacatgctggcctacgtgcccctcatcttcccggccacctggctgctggacaccagaggcctgcggctcaccgccctgctgggctccggcctcaactgcctgggtgcctggatcaagtgcggcagtgtgcagcagcatctcttctgggtcaccatgttgggccagtgcttgtgctcggtggcccaggtgttcatcctgggcttgccctcccgcatcgcctcagtgtggtttgggcccaaagaggtgtccacagcttgtgccaccgccgtgctgggcaatcagcttggaactgcagttggctttttgctaccaccagttttagtacccaacacacagaatgacacaaatctcctggcttgtaatatcagcaccatgttttatggaacatcagctgttgccacacttttatttattttaacagcaattgccttcaaagaaaaacctcggtatccaccaagtcaggctcaagcagctcttcaagacagtccccctgaagagtactcctataagaaatcaataagaaacctgtttaaaaacattccttttgtccttctgttgatcacttatggtatcatgactggtgccttttattcagtctcaacgttattaaatcaaatgatattgacatattatgagggagaagaagtcaatgctggaaggattgggctaacgctagtagtagctggaatggtgggctctattctttgtggcttatggctggattatactaaaacatacaaacagactactctgatagtttatattttgtcttttattggaatggttatctttactttcacattggaccttagatatattatcatcgtgtttgttactggaggggtgcttggcttcttcatgactggttacctccctttgggttttgaatttgctgttgaaatcacttaccctgaatctgaaggtacttcatctggtcttcttaatgcttctgcacagatatttggaattttgttcacattggctcaaggaaagctcacatcagactatggtcctaaggcagggaacatttttctctgtgtctggatgtttataggcatcatattaacagcattaatcaagtctgatctgcgaagacacaacataaatataggaattacaaatgttgatgttaaagctataccagctgacagtcccacagaccaagaaccaaaaacggttatgttgtccaagcagtcagaatcagcaatttgaagagaaaggcaaagttactgtcctgtagtaattggggacaatgtgatcatccttggagagagatgtgagcaccaaggctgggtttgtatgtggtgggggaataaacacacttacttgaaaattaccatatgaactctaaatgcataattattattttgcttaattgttaaattaagggaaattttcttaaaattcttctgtttacatcatgttaacactactgtttatctaattagtatccggtttttagtctcatattgtatctgaaagtaagcttcttgacgtttactttttaaaagtcgatgtttttcttttttgtagaaaatggaagcttagaatactttttaaagtgataatatggggtgttcagtccccataagatataatagttcatgcagtttatatattaaagtatccagtggaactaaatgtacaatatattcctaattggctgcctttttcactgtgctgaccagctgttcaagccacttcagtttgagtacaacataccaacatgacactactcacccacaaaggacagcattgggatcaggctttcagatgacctctaagatttttcccatttattgtactcttgttacaaagtactttttaacacatgcagtcaatggctataaaaactattctgtgtacagattctacccagactttggtcttagaattatgttctaattaaggagcctggttacaggttcattctgtcttgagttcttttctgtgctgcctttctatcatggataaatgctaacgctgtattttttcactccaacttgagatagagtagttttgtacccattgccttttttttcttttaaactctctttttttttttttcctgatgtgtaactttctagtaagataatttcatcatgtatgttactggctatttcatgatttcatgtatcacatcgtatattttgccttgaagattcctgaaataaggaaatctataataacttcagatagcctacatgtccccatttagtggagacctcttgaatgctatttgaattctgcagtatcatttttatgaccattctcctttgaggaatactatgcccaggtacatgctctatcagtgtgccgggagagtggattcttttcttcactgcagagtcatcacactgttagaatagtctgctcttttacatgctcaggtagggaaaataggaccaaatatatttccacagtgcctaccactgtgtcatgtttacagtgagagtttaaatattgttgatgtcctgactctgtgagctcatagggagtatcttcatagtaatgacatttgatcagccataaaatttacattatgttcatatgcacccaaaaaagctagtcaggtaatgaatacccttgaagtgaatagcaattttgatttaggcagtgtgttaggccatccttgcattgctataaagaaatatttaggctgggcgtggtggctcacgcctgtaatcccagcactttgggaggctgaagcgtgtggatcacctgaggtcaggagttcaagaccagcctggccaacatggtaaaaccccatctctact

SEQ ID NO: 1980 - DNA, 1987 bp, HOMO SAPIENS
gggacttcccggtaggctcaggatccccctccctgctctcccctcccccatcttcaccactgctctctcagagatccaggtccgggagatgacagtggctcccagaaagcccaggattcaatcgctgagagagtgcttaggcccgaatgccggcccaaatcgttctactcaccgtgtcggaggccgaggccgaggccgagagcgatgagagtgcagggaagtggggaagagggggtggccgccaggctcctccgcttccctgggtccacggcggatccctcccgcttgtcaggaggcggccagcgggtaagctgactggcggaaatgcgagagaggagaagggaaaggtggaaggctaaagggggcaaactgaggggaggcgggtcccgcaaccgagactgggatcgtctcccctccgcaaagcgaacccaaaatggcggcgggagcggcggcggcggcggcggcagcagcagagtggcggcggtggcggcggcagctcctccagagggagggagcgaagggcgcctagcgcccccctcaaccttccactccttcctccttgcgttctttcccaccgtcccccgctccgcccgactccgtccgcgtagcgcgcacgcccgcccgcacgcgtacgagtgtctacgggctcgtcgctggctgctcccaccaaccaccaccttcggccgccccgcgcgccagccagcccgtacgcgctcacccacaggaaccccctcgtccagtccctcactacccctcaggccctgtcaagccggcgccggcgcaggccctcacgcgtaccttcaacggcgcaagcccaagcctcctcctcctcctcctccacctcctcttctctcctccccccccttccccgcccccacggccaccaaccgccgccacggccgccgccgccgccgccagccccccctaccaccctccacccctcgcgcgtgcgcctcccacaatcccccccgcgggactgttccattcctgtcggctgcaggggcaggagaggaagggacgggccgagcgggtcggggcttgccgtttgactggaattgccagaatggcggaccgagccccacgacaacctacctccctgggctcctcgccgcagcgctgcggctcgcctccctctgctcctcctcctccgccggatcgcggcgagcggatcgaggactgcctagcgcccctctgcccaccggtggttggaggccgcggcggctgcgcgttgagtcgtttcctgccggttgacctgagcctacttcgcagtagcaggaccgctgctgtggagctggtcgcaggcggtgtgtgccggtcgcctagtcaggagaactagtcctcgactcacggtgagggaatggaccgacacgggtattgtaccgctgagggaaaggagcgggactccggacctccaggaggtagggagtgaggccagtaggaccggcgcgcctccggggggattcctcccgggcgttgagttgccaacctgggacccgaggaagatcggcgtggtggtgtgctttttgttgttgttaaccctcctcggatttctcgaatttcacaccactgtccatatgcgatgatgtttgtttgcccttgacgcacttactcatggatggtacttcttcagcctcgttagacagcctggtgatggaggatgaagaaaccatgtgcttttcattcagttctggacttagtctcccttttcttccttcagcaagttatttttgttagttccttatcaaaaagtgtacataaaaattaggcaactccaaacatgcctccagggttaatgtgtgaaataataagataatatatgtaaagtggaattagctcctaggcatagggaaagtgcagaatattgccgtgttgtcatttacagttctgttgatgtcgataacgtttgtgggtgtaattggtagtgttctgtccctccaaggagttaataaaacaaagcaaacataaaaaaaaaaaaaaaaaaaaaaaa

SEQ ID NO: 1981 - DNA, 4285 bp, HOMO SAPIENS; identical to SEQ ID NO: 1294

SEQ ID NO: 1982 - DNA, 8891 bp, HOMO SAPIENS
gcggccgccgccatcagcagcgcagctccagggccggctgcagcggcagcggctccgccgggcgtcctggcagcagcacatggattaattgatgtatgttgagtttatggagctgccttttggtggcttgctttatctgcagtttttaagaagaaaaagaaggccctgagtcaaagaagatgcctcgaactaaacaaattcatcccagaaatctaagagacaaaattgaagaagcacaaaaagaacttaatggggcagaagtttcaaaaaaagaaatcttacaggctggtgttaaaggaacttcggaatcccttaaaggtgtgaaacgcaaaaagatcgtagctgagaatcacctgaaaaaaataccaaaatccccactgagaaatcctcttcaggcaaaacataaacaaaatacagaagagtcatctttcgccgttcttcatagtgcttcggagtctcacaagaaacagaattatattcctgtaaaaaatgggaagcagtttaccaaacaaaatggagaaacacctggaataattgctgaagcctcaaaatctgaagaatctgtctccccaaagaagcccttgtttctgcagcaaccatctgaactgcgtagatggagatccgaaggcgctgatcctgccaaattcagtgacctcgatgaacaatgtgactcaagttccttgtcaagtaaaaccaggactgacaatagcgaatgcatctcttctcattgtggcactacgtccccctcctatacaaacactgcattcgatgtcttactgaaagcaatggagccagaactgagcaccttgtcacaaaagggctcaccttgtgcaattaagacagaaaaactgaggccaaataaaactgcacgttcccctcccaaattaaaaaacagttcaatggatgccccaaatcagacttcacaggaattggttgctgaatcacagtcttcttgtacctcatacacagtccatatgtctgctgctcagaagaatgagcaaggggcaatgcagtcagcttctcatttgtatcatcaacatgaacactttgttcccaaatccaaccaacataatcaacagcttccggggtgttcaggtttcacaggatcactgacaaatctgcaaaatcaagagaatgccaaacttgaacaggtttataatatagcagtgacatcatctgtaggcctaacttcaccttccagtagatctcaggttactcctcaaaaccagcaaatggattctgcttcacctttgtcaataagtccggctaattctacacagtcgccccccatgccaatctataattcaactcatgttgcctctgttgttaatcaaagcgtagagcaaatgtgcaatcttcttctgaaagatcagaagccaaaaaaacaaggaaaatatatttgtgagtattgcaatagagcatgtgcaaagcctagtgtgcttttaaagcatatccgctcccacactggagagcgaccctatccctgtgtgacttgtggattttcatttaagactaaaagtaatctgtataagcacaagaaatcccacgcacatactatcaaactgggtcttgtcttgcaaccagatgctggtggcttgttcttgtcccacgagtcccccaaagcacttagtattcattcagacgtagaagacagtggggagagcgaggaggaaggcgccactgatgagagacagcatgacctgggcgccatggagctgcagcctgtgcacataataaagaggatgtcaaatgctgaaactttactaaaatcaagcttcactccaagcagtccagaaaatgtgataggtgactttttgctacaggacagatctgcagaatcacaagctgtgacagagttaccgaaagttgtggtccaccatgtcactgtgtcccccttaagaactgacagtccaaaggccatggatcccaagcctgaactttctagtgcacaaaagcagaaggaccttcaggtgacaaacgtacagccactttcagccaacatgtcccagggtggagtctccaggttggagactaatgagaattcccaccagaaaggcgacatgaatccactggaaggaaagcaagactctcacgtaggaacggtacacgcccagctacaaaggcagcaggctaccgattactcccaagagcagcaaggaaagctcctgagtcctcgaagtttaggaagtacggattctggttacttttcacgttctgaaagtgccgatcaaacagtgagtccaccaactccctttgccagaaggttacccagcacagaacaagactctggaaggagtaacggaccctctgcagctcttgtcaccacgtcaacaccctctgctttgcccacaggggaaaaggcattgcttttaccaggtcagatgcgcccacctttggccacaaaaacacttgaggagcggatatcgaagcttatctcagacaatgaagctttggtagatgacaagcaactggatagtgtgaagccgcggagaacctcactgtcaagacgaggaagcattgattcccccaaatcatacatatttaaagattctttccagtttgatttaaaaccagtgggacggagaacaagttcaagctctgatataccgaagtcacctttcacccctactgaaaaatcaaagcaagtgtttcttctgtctgtaccttcacttgactgtttacctatcacaagaagtaattccatgccgaccacaggttattcagcagtacctgcaaatataatacctcctcctcatccactaagaggaagtcagtcatttgatgacaaaattggcactttctatgatgatgtctttgtatcgggacctaacgctcctgtgccccagagtgggcatccccgtacacttgtgagacaagcagccatagaagactcttcagcaaatgaaagtcatgttcttggtactggacagtccctggatgagagccaccaaggatgccatgctgctggtgaagccatgtcagtgaggagcaaggcactggcacaaggcccacatatagaaaaaaagaagtctcatcaagggcgagggacaatgtttgagtgtgaaacttgtagaaacaggtataggaaactggaaaattttgaaaatcataagaaattttactgttctgagttacatggaccaaaaacaaaggtagccatgagagaacctgagcacagccctgtgcccggcggtctgcagcctcagattctacactacagagtcgctgggtcctccggcatctgggaacagacgccccagataagaaaaaggaggaaaatgaaaagtgttggggatgatgaagaacttcagcaaaatgaaagtggaacatctccaaaaagttctgaaggccttcagtttcagaatgctctgggctgtaatcccagtttgcctaaacataatgttaccataagaagtgaccagcagcataaaaatatacagttgcaaaactcccatattcaccttgttgccaggggccctgagcagaccatggatcccaagctgtcgaccatcatggaacaacagataagttcagcagcccaggacaagatagaactgcagagacacggaactggaatctctgtcatccagcacaccaactccctgagcaggcccaactcatttgacaagcctgagccttttgaaagagcctccccagtttctttccaggagctgaatagaacggggaagtccgggtctctaaaagtgataggaatctcccaagaggaaagtcacccttctcgggacgggtctcatcctcaccagcttgcactatcagacgctctcagaggagaacttcaggaaagctccagaaagagtccaagtgaacgacatgtgttaggacagccctcaagacttgtccggcagcacaacatccaagttccagagattttggtcacagaagaaccagatcgagacctggaagctcaatgccatgatcaagaaaagtcagagaagttcagttggccccagcgtagtgaaaccttgtcaaaattgccaacagagaaactgccacccaaaaagaaaaggctccgtctggctgagatagaacattcctcaacagaatcgagctttgattccactctctccaggagtctaagtagggagagcagtttatctcacacttcaagtttctcagcctctttagacatagaggacgtttctaaaacggaggcttcccccaaaatcgattttctaaataaagccgagtttcttatgattccagctggcttgaatactctgaatgttcctggatgtcaccgggaaatgaggcgtactgcatcagaacagattaattgcacgcaaacgtcaatggaggtctctgatctcagaagcaaatcattcgattgtggaagcatcaccccaccccagacaacaccacttactgaattgcagcctccatcttcaccttctcgagtgggagtgactgggcatgtgcctctcttagaaagaaggagaggcccactggtacggcaaatatctttaaacatagccccagatagtcatctgtctcctgtacacccaacatctttccaaaatactgctcttcccagtgtgaatgcagtgccatatcaggggcctcagctcactagtacatctttagctgagttttctgcaaatactttgcactctcagactcaggttaaggatctgcaggcagaaacatcaaactccagctctaccaacgtttttcctgttcaacagctctgtgatatcaatttgttaaatcaaatccatgcaccgcctagccaccagagcacacagctatctctgcaagtgtctacgcagggtagcaagccagataaaaattctgttttatctgggtcttctaaaagtgaggattgctttgctcccaaataccaattgcattgtcaggttttcacttcaggcccatcttgctcttctaatcctgtgcattctttgccaaatcaagttatttcagatccagttggaacagatcattgtgtgacatcagcaacattaccaaccaaattaattgacagcatgtctaattcgcatcctctgctaccaccagagctcaggccccttggaagtcaggtgcagaaggtgccatcatcattcatgctgcccatacgcctgcagagtagtgttcctgcttactgttttgctacactcacatccctgccacaaatactagtgacccaagatctgcccaatcagccaatttgccagactaatcatagtgtagtgccaatcagtgaagaacaaaattctgtgccaacattacaaaaaggtcatcagaatgctttgccaaacccagagaaggaatttctatgtgaaaatgttttttcagagatgagccaaaattcttctctatcagaatccttgcccataactcagaaaatatctgttggtcgactttcccctcaacaagaatcttcagcttcgagtaaaaggatgctttccccagcaaatagtttagacattgccatggaaaagcaccagaagcgggccaaagatgaaaatggagctgtttgtgcaacagacgtgagacctttagaggctttgagttcgagagttaatgaagctagtaaacagaagaagcctattttagtgagacaggtttgtactacagagcccctggacggtgtgatgttggaaaaggatgttttttctcaacctgaaattagtaatgaggctgttaatttgacaaatgttttaccagctgataattcatcaacaggatgctctaaatttgtcgttatagaacctataagtgaattgcaggaatttgaaaacatcaagtcatccacatcattaactcttacagttcgaagttcacctgctccttcagaaaatactcatatttctcctttgaaatgtacagacaataaccaagaaaggaagtctccaggggttaaaaatcaaggtgacaaagtgaacatccaagagcaaagtcaacagccagtcacttctctttcattgtttaacatcaaggacacccagcagctggctttccctagcctgaaaactacaaccaactttacatggtgttatctcttaaggcagaagtcgttgcatttgcctcagaaggaccagaaaacttcagcctatactgattggacagtaagcgccagtaatccaaatccactcggtttgcccacaaaagttgcacttgctctccttaattcaaaacagaacactggaaaatcactatactgtcaagcaataactacccattccaagtcagacttattggtctattcaagcaagtggaaaagcagcttaagcaagagagcattaggtaatcaaaagtccacagtagttgaattcagcaataaagatgcctctgaaattaacagtgagcaagataaagaaaattccttaatcaaaagtgaaccaagaagaattaaaatatttgatggaggatataagtcaaatgaagagtatgtatatgtccgaggcaggggaagaggaaaatacatttgtgaagaatgtggaatacgttgtaagaaacctagcatgttaaagaaacacatacgaacccatacagatgtccgcccctaccactgcacttactgtaacttctcctttaagactaaaggaaatctgacaaaacacatgaagtccaaggcacatagcaagaaatgtgtggatttaggcgtctcagtaggtttaatagatgaacaggatacagaagaatcagatgaaaaacagagattcagttatgagcgatctggatatgatcttgaagaatctgatggcccagatgaggatgacaatgaaaatgaagacgatgatgaggacagccaggctgaatcagtcctgtcagccacaccctcagtcacagctagcccgcagcaccttccatctagaagtagccttcaggaccctgtgagtactgacgaggatgtcaggatcaccgattgcttttctggggtacacacggacccaatggacgttctgcccagggcgctgctcaccagaatgactgtcctgagcacagcacagtctgactacaataggaagacactctctccggggaaggccaggcagcgtgctgcgagagatgaaaacgacacaattccgtctgtagacacttccaggtccccgtgtcatcagatgtctgtggactaccctgagtcagaagaaattctgagaagttctatggcaggaaaagctgttgctataacacagagcccatcatctgtaagacttcctcctgctgcagctgagcacagcccccagacagcagcggggatgccttctgtggcctcaccacatcctgaccctcaagaacagaagcagcaaataactctacagccgactccaggcttgccttctccccacactcatttgtttagccaccttcctttgcattcccagcagcaatcgaggacaccttataatatggttccagttggggggatccatgtggtacctgctggcctcacatactccacgtttgtgccccttcaggctggaccagtgcagctcacgatccctgctgtcagtgtcgttcacagaactttgggtactcataggaatacggtcacagaagtgtctggcactacaaaccctgctggagtggctgaattaagcagtgttgtgccatgtattcctatcggccaaatccgcgtgccaggccttcagaacctaagtaccccaggcttgcagtcactcccctcgttaagcatggaaaccgtcaatattgtaggcctagccaatacaaatatggccccacaagtccatccaccaggactggctctgaatgctgtcggactgcaggttctgactgcaaacccttcatcacaaagcagccccgcccctcaggcacacattccaggtctccagatcttgaacatagcattgcccaccttaatcccctcagtcagtcaagtagccgttgatgcacagggagctccagaaatgccagcttcccaaagcaaagcatgcgagacacaacccaagcagacttctgtagccagcgcaaaccaggtcagcaggaccgagtctcctcaggggttacctacagtccagcgggaaaatgcaaaaaaagttctgaatccacctgcccctgcaggtgaccatgcaaggcttgatggcctgagtaaaatggacacagagaaggctgcctcggcaaatcacgtgaagcccaagcctgaactcacttccatacagggccaaccagcgtccacgtcacaacctctgctgaaggcacattctgaagtttttacaaagccctcaggccagcagactctctctccagacagacaggttcccaggcccacagcactaccgcggaggcagcccactgtgcacttcagcgacgtgagcagcgatgatgacgaggacaggcttgtgatagcaacctgatggattttattttttatttgctttttttttatataacacttaaaggtttctttgaaaaccctcctttccttaaagcacatttttctgacataaactcatgactaatctttgtgcaatcatgaacttttgaccaataattgttgttttgtgtcagctccagccatttttgtacatgttgtatagacaattgtgccttttaggagctttatgtttagaaactgtacagattgttgaatatctatatacataaaaatatattatatatgtatatgaaaaccaggtagttatttgtgtttagtaaggaaaacctgtcaaataaatcaaatgattaaattatatgttccactgttgaatataaattttatggctatggggcagagtttctgtgtataaattagtatgtaaactccatatttattgtattcatattagtctttgaaaatgggtctgtcctccttgtgtaagacagtaactttacacttcagacagattttctgtgttatgaaatgtttcagtaaaatattgtttactgactttaaaaaaaaaaaaaaaaaa

SEQ ID NO: 1983 - DNA, 3677 bp, HOMO SAPIENS
tcgcggaggcttggggcagccgggtagctcggaggtcgtggcgctgggggctagcaccagcgctctgtcgggaggcgcagcggttaggtggaccggtcagcggactcaccggccagggcgctcggtgctggaatttgatattcattgatccgggttttatccctcttcttttttcttaaacatttttttttaaaactgtattgtttctcgttttaatttatttttgcttgccattccccacttgaatcgggccgacggcttggggagattgctctacttccccaaatcactgtggattttggaaaccagcagaaagaggaaagaggtagcaagagctccagagagaagtcgaggaagagagagacggggtcagagagagcgcgcgggcgtgcgagcagcgaaagcgacaggggcaaagtgagtgacctgcttttgggggtgaccgccggagcgcggcgtgagccctcccccttgggatcccgcagctgaccagtcgcgctgacggacagacagacagacaccgcccccagccccagctaccacctcctccccggccggcggcggacagtggacgcggcggcgagccgcgggcaggggccggagcccgcgcccggaggcggggtggagggggtcggggctcgcggcgtcgcactgaaacttttcgtccaacttctgggctgttctcgcttcggaggagccgtggtccgcgcgggggaagccgagccgagcggagccgcgagaagtgctagctcgggccgggaggagccgcagccggaggagggggaggaggaagaagagaaggaagaggagagggggccgcagtggcgactcggcgctcggaagccgggctcatggacgggtgaggcggcggtgtgcgcagacagtgctccagccgcgcgcgctccccaggccctggcccgggcctcgggccggggaggaagagtagctcgccgaggcgccgaggagagcgggccgccccacagcccgagccggagagggagcgcgagccgcgccggccccggtcgggcctccgaaaccatgaactttctgctgtcttgggtgcattggagccttgccttgctgctctacctccaccatgccaagtggtcccaggctgcacccatggcagaaggaggagggcagaatcatcacgaagtggtgaagttcatggatgtctatcagcgcagctactgccatccaatcgagaccctggtggacatcttccaggagtaccctgatgagatcgagtacatcttcaagccatcctgtgtgcccctgatgcgatgcgggggctgctgcaatgacgagggcctggagtgtgtgcccactgaggagtccaacatcaccatgcagattatgcggatcaaacctcaccaaggccagcacataggagagatgagcttcctacagcacaacaaatgtgaatgcagaccaaagaaagatagagcaagacaagaaaaaaaatcagttcgaggaaagggaaaggggcaaaaacgaaagcgcaagaaatcccggtataagtcctggagcgtgtacgttggtgcccgctgctgtctaatgccctggagcctccctggcccccatccctgtgggccttgctcagagcggagaaagcatttgtttgtacaagatccgcagacgtgtaaatgttcctgcaaaaacacagactcgcgttgcaaggcgaggcagcttgagttaaacgaacgtacttgcagatgtgacaagccgaggcggtgagccgggcaggaggaaggagcctccctcagggtttcgggaaccagatctctcaccaggaaagactgatacagaacgatcgatacagaaaccacgctgccgccaccacaccatcaccatcgacagaacagtccttaatccagaaacctgaaatgaaggaagaggagactctgcgcagagcactttgggtccggagggcgagactccggcggaagcattcccgggcgggtgacccagcacggtccctcttggaattggattcgccattttatttttcttgctgctaaatcaccgagcccggaagattagagagttttatttctgggattcctgtagacacacccacccacatacatacatttatatatatatatattatatatatataaaaataaatatctctattttatatatataaaatatatatattctttttttaaattaacagtgctaatgttattggtgtcttcactggatgtatttgactgctgtggacttgagttgggaggggaatgttcccactcagatcctgacagggaagaggaggagatgagagactctggcatgatcttttttttgtcccacttggtggggccagggtcctctcccctgcccaggaatgtgcaaggccagggcatgggggcaaatatgacccagttttgggaacaccgacaaacccagccctggcgctgagcctctctaccccaggtcagacggacagaaagacagatcacaggtacagggatgaggacaccggctctgaccaggagtttggggagcttcaggacattgctgtgctttggggattccctccacatgctgcacgcgcatctcgcccccaggggcactgcctggaagattcaggagcctgggcggccttcgcttactctcacctgcttctgagttgcccaggagaccactggcagatgtcccggcgaagagaagagacacattgttggaagaagcagcccatgacagctccccttcctgggactcgccctcatcctcttcctgctccccttcctggggtgcagcctaaaaggacctatgtcctcacaccattgaaaccactagttctgtccccccaggagacctggttgtgtgtgtgtgagtggttgaccttcctccatcccctggtccttcccttcccttcccgaggcacagagagacagggcaggatccacgtgcccattgtggaggcagagaaaagagaaagtgttttatatacggtacttatttaatatccctttttaattagaaattaaaacagttaatttaattaaagagtagggttttttttcagtattcttggttaatatttaatttcaactatttatgagatgtatcttttgctctctcttgctctcttatttgtaccggtttttgtatataaaattcatgtttccaatctctctctccctgatcggtgacagtcactagcttatcttgaacagatatttaattttgctaacactcagctctgccctccccgatcccctggctccccagcacacattcctttgaaataaggtttcaatatacatctacatactatatatatatttggcaacttgtatttgtgtgtatatatatatatatatgtttatgtatatatgtgattctgataaaatagacattgctattctgttttttatatgtaaaaacaaaacaagaaaaaatagagaattctacatactaaatctctctccttttttaattttaatatttgttatcatttatttattggtgctactgtttatccgtaataattgtggggaaaagatattaacatcacgtctttgtctctagtgcagtttttcgagatattccgtagtacatatttatttttaaacaacgacaaagaaatacagatatatcttaaaaaaaaaaaagcattttgtattaaagaatttaattctgatctcaaaaaaaaaaaaaaaaaa

SEQ ID NO: 1984 - DNA, 2518 bp, HOMO SAPIENS
ctcgggaggtcactcggctgctgggcgggctgctgtcacaggcgctgcgtgccctggctctgctcgccactggccggcgcgctcccggcgcacggagcacactcgcgctcccggcgcacggagcacactcgcgctccgggactgaaacctgagcagccgtagcagccgaatttgggagcatatccttgtcactgcagccagaaagcccttcgatccccatcagagaggtcacatgagccccgaggtcacctgcccgcggaggggccacctgcctcgcttccacccgaggacctgggttgagcccgtggtggcctcgtcccaggtggctgcctccctctacgatgcggggctactcctcgtggtgaaggcgtcctacggaaccggaggctcctccaaccacagtgccagcccatcgccccggggggctctagaggaccaacagcagagagccatctccaatttctacattatctacaaccttgtggtgggcctgtcccccctgctgtccgcctacgggctgggatggctcagcgaccgctaccaccgaaagatctccatctgcatgtcgctgctgggcttcctgctctcccgcctcgggctgctgctcaaggtgctgctggactggccagtggaggtgctgtacggggcggcggcgctgaacgggctattcggcggcttctccgccttctggtccggggtcatggcgctgggatcgctgggctcctccgagggccgccgctctgtgcgcctcatcctcattgacctgatgctgggcttggcggggttctgcgggagcatggcttccgggcatctcttcaagcagatggctgggcactctgggcagggcctgatactgacggcctgcagcgtgagctgtgcctcgtttgccctgctctacagccttttggtgctaaaggtccctgagtcggtggccaaacccagccaggagctccccgccgtggataccgtgtctggcacggttggcacataccgcactctggatcctgatcagttggaccaacagtatgcagtggggcaccctccatctcctggaaaagcaaaaccccataaaaccaccattgccttgctctttgtgggtgctatcatatatgacctggcggtggtgggcacagtggacgtgatccctctttttgtgctgagggagcctctcggttggaaccaagtgcaggtgggctatggtatggctgcagggtacaccatcttcatcaccagcttcctgggtgtcctggtcttctcccgctgctttcgggacaccaccatgatcatgattgggatggtctcctttgggtcaggagccctcctcttggcttttgtgaaagagacatacatgttctatattgctcgagccgtcatgctgtttgctctcatccccgtcacaaccatccgatcagctatgtccaaactcataaagggctcctcttatggaaaggtgttcgtcatactgcagctgtccttggctctgaccggcgtggtgacatccaccttgtacaacaagatctaccagctcaccatggacatgtttgtgggctcctgctttgctctctcctcctttctctccttcctggccatcattccaattagcatcgtggcctataaacaagtcccattgtcaccatatggagacatcatagagaaatgaagatgcttacctgcaggaactgaaaacatcagccatggccaggcccccagaagacaaaagaagggaccagggaactggtgacctaagcaacccactgcttaagaaacctgcgttccagccagagttggcctcagaatgacctgctctggctcagggatccctggtggatggggaaaagcactttcctggtgatggaaaaacgttctcagctttaagacacccccattaggcagacactgggttctgtgacagcagagcatgaccttaagggttacaggcaggctgcacacagcagtcccaggccctgtgaggggcttcagactccagctacagcgagcctgccccttttcttcaagggactgtcttgagggctccaaagtatagctaactagtcacctgggtgctgtgctgaaagtcccatgggagaactcaaagcgtgcattatcacagcctgaggggaatgtggaagggatgttttgtaagaactaccaacagttttgcacgaacaatgtcttttaaattaaaataaaaccttgaaaaaagtcagctttctttcctgagtcttccttacctacaaacactcaggagggggatggagctcaggcccttgtcttctgggtagttttgttactactgttgcttttaagaagcaaatgtcacaaggctttcttcaatgggatgttcaattgagtacttccagtcaacagtgcttcccaaagtgggtggtgtgaaggaagaggaggtacattaagagctattttatttgaggtagtcatttttataaccttgtttacttggatttataaaagcagactcacctaataaaatcaacattcattgtaaaaaaaaaaaaaaaaa

SEQ ID NO: 1985 - DNA, 542 bp, HOMO SAPIENS
  misc_feature (151)..(151): n is a, c, g, or t
  misc_feature (154)..(154): n is a, c, g, or t
  misc_feature (166)..(166): n is a, c, g, or t
  misc_feature (249)..(249): n is a, c, g, or t
  misc_feature (335)..(335): n is a, c, g, or t
  misc_feature (339)..(339): n is a, c, g, or t
  misc_feature (341)..(341): n is a, c, g, or t
ataatgtacatgaaaggtcttccttgataaacgataaaccttgtgattttgccacacaagaatttagctaaaccctttcctaatgtcattgtatatgagtagtacagattccatgtgtttgtttccattgaatatacagaaatactgaatnctnccttaaaacagncttttattgaaaaaaggaagctgataaaaatcactttgcttttttataaaaacgcttgataggattacctttctagagagacntctgtgtatggccacacttatccaccacagtttttgtttatatagagagcattttaaaaagaagaaggttttcctggccatgcacnagtngntcacgcctgtaatcccagcactttgggaggccaaggcggaaggattgcttgaggccaggagtttgagaccagcctaggcaacattgtgagactgtttctataaaaaaaaaaaaactgaaaaatcagccagccatggtcgcccatgcctgtgttcccagctacttgggaggctgaagcaagaaggattcttgagccccggag

SEQ ID NO: 1986 - DNA, 1646 bp, HOMO SAPIENS
cactgcgaagcccagctgcgcgcgccttgggattgactgtccacgctcgcccggctcgtccgacgcgccctccgccagccgacagacacagccgcacgcactgccgtgttctccctgcggctcggacacatagtatgaccattaggtgtttcgtctcccacccattttctatggaaaaccaaggggatcgggccatgatagccactggcagctttgaagaacgggacacctttagagaagcttgatcttggaggcctcaccgtgagaccttacaaagccggattccggcagagttcctctatctcgtcttgttgctgattaaaggtgcccctgtctccagtttttctccatctcctgggacgtagcaggaaatcagcatcatggttgggttcaaggccacagatgtgccccctactgccactgtgaagtttcttggggctggcacagctgcctgcatcgcagatctcatcacctttcctctggatactgctaaagtccggttacagatccaaggagaaagtcaggggccagtgcgcgctacagccagcgcccagtaccgcggtgtgatgggcaccattctgaccatggtgcgtactgagggcccccgaagcctctacaatgggctggttgccggcctgcagcgccaaatgagctttgcctctgtccgcatcggcctgtatgattctgtcaaacagttctacaccaagggctctgagcatgccagcattgggagccgcctcctagcaggcagcaccacaggtgccctggctgtggctgtggcccagcccacggatgtggtaaaggtccgattccaagctcaggcccgggctggaggtggtcggagataccaaagcaccgtcaatgcctacaagaccattgcccgagaggaagggttccggggcctctggaaagggacctctcccaatgttgctcgtaatgccattgtcaactgtgctgagctggtgacctatgacctcatcaaggatgccctcctgaaagccaacctcatgacagatgacctcccttgccacttcacttctgcctttggggcaggcttctgcaccactgtcatcgcctcccctgtagacgtggtcaagacgagatacatgaactctgccctgggccagtacagtagcgctggccactgtgcccttaccatgctccagaaggaggggccccgagccttctacaaagggttcatgccctcctttctccgcttgggttcctggaacgtggtgatgttcgtcacctatgagcagctgaaacgagccctcatggctgcctgcacttcccgagaggctcccttctgagcctctcctgctgctgacctgatcacctctggctttgtctctagccgggccatgctttccttttcttccttctttctcttccctccttcccttctctccttccctctttccccacctcttccttccgctcctttacctaccaccttccctctttctacattctcatctactcattgtctcagtgctggtggagttgacatttgacagtgtgggaggcctcgtaccagccaggatcccaagcgtcccgtcccttggaaagttcagccagaatcttcgtcctgcccccgacagcccagcctagcccacttgtcatccataaagcaagctcaaccttgg

SEQ ID NO: 1987 - DNA, 727 bp, HOMO SAPIENS
atgagggtcctcgggctacgaggacctagtgaaaaacgtggctgccctactactttgctaagaacaagaaccacacagtccggcacccccaccccaggggccgcatcccacaccccaggacccctgttcccagttctctccactaccccggcggccgcggggccgggtcccacctgtggtgaggcagcggccgaggtgggcgccgacaatggcgcacatcgcctgcgcttcggggacgccgggctcaacagcgggtcgaaatccagagtccttttcagacgccggctgtggaaaggagagccgctgccgccgctgcctccgcggcaggggcagtggccagggacggcccgggtgagagcgggaggggcggtggcgggcagaagcacacgccagtcgcgtcaggggggttcttccgcctcctcaggcgcggctcccccgagagaggctccggccgcccccgccgtccgctcgagctttgcgccgcgcctgaggcgcttctgtgctgagactagatcctttctgaagtcgaaaacagcaccgtggggtgtgaggctggaacgcggctcctaatacgcccgagtacggtcagtagcttgcgagcggcgatcgatgcagagagattgcgaggtagctgccgcagcaggaacccaagcgaacacgtccaaccgcttcccctccctcgtagaactctcccacccgccgccggccccaatatggcgtcaataac

SEQ ID NO: 1988 - DNA, 1196 bp, HOMO SAPIENS
gctctctggcgcggggccccttagtccgggctttttgccatggggtctctgttccctctgtcgctgctgttttttttggcggccgcctacccgggagttgggagcgcgctgggacgccggactaagcgggcgcaaagccccaagggtagccctctcgcgccctccgggacctcagtgcccttctgggtgcgcatgagcccggagttcgtggctgtgcagccggggaagtcagtgcagctcaattgcagcaacagctgtccccagccgcagaattccagcctccgcaccccgctgcggcaaggcaagacgctcagagggccgggttgggtgtcttaccagctgctcgacgtgagggcctggagctccctcgcgcactgcctcgtgacctgcgcaggaaaaacacgctgggccacctccaggatcaccgcctacagtgttcccggtgggctacttggtggtgaccctgaggcatggaagccgggtcatctattccgaaagcctggagcgcttcaccggcctggatctggccaacgtgaccttgacctacgagtttgctgctggaccccgcgacttctggcagcccgtgatctgccacgcgcgcctcaatctcgacggcctggtggtccgcaacagctcggcacccattacactgatgctcgcttggagccccgcgcccacagctttggcctccggttccatcgctgcccttgtagggatcctcctcactgtgggcgctgcgtacctatgcaagtgcctagctatgaagtcccaggcgtaaagggggatgttctatgccggctgagcgagaaaaagaggaatatgaaacaatctggggaaatggccatacatggtggctgacgcctgtaatcccagcactttgggaggccgaggcaggagaatcgcttgagcccaggagttcgagaccagcctggacaacatagtgagaccccgtctatgcaaaaaatacacaaattagcctggtgtggtggcccgcacctgtggtcccagctacccgggaggctgagttgggaggatcctttgagccctgaaagtcgaggttgcagtgagccttgatcgtgccactgcactccagcctgggggacagagcacgaccctgtctccaaaaataaaataaaaataaaaataaatattggcgggggaaccctctggaatcaataaaggcttccttaaccagc

SEQ ID NO: 1989 - DNA, 5768 bp, HOMO SAPIENS
aggcgccctcccctcgccgggggccgcgagttgcatttggtaaaacccagccccggaatatatagatcgttggagcgcaatgaagtagcctttggagagaagggagagggcccgtcggacagccacagcggccagcgcagcggcagcggcggcggcaccaccatcaccgctcgcaccccagccgcccggcccgcgaccaggcagcggcggccgccggcgggatcggaggaggcggcggagcggcgaggaggaggagcaggagcgcgcagccagcgggtccacgcatctcagcacttccagaccaactccggcaccttccacacccctgcccgggctgggggctccgagagcggccgcgaagcgactccgatcctccctctgagccttgctcagctctgccccgcgcctcccgggctccggtccgcgcggcggggtccctgctcctgcgccccgggcgcgcttcccggacaccccggtccccgcagccaggacaaagccatgaagccagcgctgctggaagtgatgaggatgaacagaatctgccggatggtgctggccacttgcttgggatcctttatcctggtcatcttctatttccaaagtatgttgcacccagtcatgcggaggaatccctttggtgtggacatctgctgccggaaggggtcccgaagccccctgcaggaactctacaacccaatccagctggagctctcaaacactgctgtcctgcaccagatgcggcgggaccaggtgacagacacgtgccgagccaacagcgccacaagccgtaagcggagggtgctgacccccaacgacctgaagcacttggtggtggatgaggaccacgagctcatctactgctacgtgcccaaggtggcctgcaccaactggaagcggctcatgatggtcctgaccgggcgggggaagtacagcgaccccatggagatcccggccaacgaggcacacgtctccgccaacctgaagaccctgaaccagtacagcatcccagaaatcaaccaccgcttgaaaagctacatgaagttcctgtttgtccgggagcccttcgagaggctagtgtccgcctaccgcaacaagttcacccagaagtacaacatctccttccacaagcggtacggcaccaagatcatcaaacgccagcggaagaacgccacccaggaggccctgcgcaaaggggacgatgtcaaattcgaggagtttgtggcctatctcatcgacccacacacccagcgggaggagcctttcaacgaacactggcaaaccgtctactcactctgccatccctgccacatccactatgacctcgtgggcaagtacgagacactggaagaggattctaattacgtcctgcagctggcaggagtgggcagctacctgaagttccccacctatgcaaagtctacgagaactactgatgaaatgaccacagaattcttccagaacatcagctcagagcaccaaacgcagctgtacgaagtctacaaactcgattttttaatgttcaattactcagtgccaagctacctgaaattggaataaagggggtggggagagggagagaatcatgctttttaatttaagatttttatttgtcaaaagaattatatggatattgggttattttgtaaattaatatttctttggggatgatgctgcgagcagcatagtgagaattatttaaaatccttcgtagggaaggacagctgtctttgcaggggaaataggatgggtcgtccttgtctgtagaagtgaatactgcaacactgtctcaaaggtttcttgtgttctggtgaattccatgaattgtgcattccataaattctaattaatattatttatagttatttaaacatggtctcattatttctttttgtggcagcaaaattctaacatctttccagaagaaatctatgattcctgctttgcttgctacagctcatttgggggcatgaatgttctccttactaacctctcatggagtcatgtgataacagccattgtcatgtgtatggatgccaccattcttgaatttctgctagaaataagtaggttgctattgcacttagagtcatctttgcaagggactcattccaaaccaattccaatcgacctgaaagtcccttgcactaaagaaatgtgatttttttttaacccaaggagaaagttggttgtaacaatttttcaccagaattagcaatctgatagaataggcttttttaacaggaattttaaactggcggtgccagttgcagtgaaggtgaagtggctattgctttatattcgacaaatatttattgagcatctactatatactaggccctgaagatagagcgttgaacaaacccaatagtcttggccctcaaaaagctttatgtgacatagagcatccagctcgacaattagcaaacccctgatattattcatggacttgacatgaggtttggactattcatgagcaacagcagaaggtccatgacccctacaaatttacatttttctatggcccatatttgaaaacctcacattcggagcaggccactttatattcgtgagtgatcccaagctcactgaccaacagaaaagatgctaaaaaaatgtgtcctatcatgtgcctgctccaactgatgggtaatgtctgcctttaagccccagaatggattctccaggcacagtgtggaagagtgctgtggttgattagcaatgtctgccttgggtgaggaaaggggaacactcctcaagtgcctcctactgtcatctccattcagcctagcaccacatccccatgtagaagtgttgtcttctactgcttgccacgtacaagtgtgaaatgccaaggtgagactcgtacacttggggatttgcaatggtttttacccctcatgaaggtcagaggtggactatttgtacacatacacacatgcacaccctctcacgtcctccagaggctgaaagactatcagcatcttggtaactgccatgcatgagcagcaaggacagccttccataatccatgccccatttcctctggaagcctggaaacttttcatttcctgttccttgctaattaacatctaaacatgcttctcatttccagccattgctgatgcttctcagttgaagtttgagccacatccctcttacagctagtgaatgagttggtagcagctactgtatataataataataatagttttaataataggggagggtgggatggggtgtgggtaagttttgccttttgttttgtttttgatgccgtatatagtgaaggggtgaggatattctaaacaaacaaaaattgaataatttattcacagaaactattaagattgtattgtaaagctcacagcaagctcagtgggcagcagctgcaacatctcaccggggaaattattttatttaacgtgagtgagatgtgggccggagaaggtagctgaagctatttataaaacgttgtgtaccttcttccgagctctctcccctttgtgaagggcgcagcaactatacccttgatggatggagatttacgcaatgtgttttactgggtagagtgacagaccttggctgtccctggaattgagaatctggaccttatttccaggcagagaacactgtcctcagaaatgggacttctgataatgaaacaggttgtccaacattttctaatacgcattctacagaacacaggttccaggaggcatcaggttggtgtgatgcagactaagggttttgtggtcaaatatccttaagaaacaaagttaagtcagtttcctttctgcaaggacttttcagccttcaatgtgtgctgtgcatggtgaatccccaaaaataatccttgagtctgtagcatttcctgaacttacatgaccaggatactctattttgcagatcaccccacagagctagggttccaccgagtatactttgcttaggttgacttagcatatctgaggtcttcaaggataaaaactgccaccccaacacccttccattaaaaaaaaaatacaaaatagcaccacagtctccatctggtttatagcaacagaggtactttatttaatgaagcaatggttctaatcctggatactgccacggactacaattctatccctcccagagggagtggaggaagtcttgggtggtgtggacagaaggaagagaggagagggtgagtggggtatagggcccagggtggctccctactcctcaggctcaaaaggatgctcagtgggaacagatgatctcttgatgagtgcttcttcagtttcatagtttggaatcgttcactgtgtgctttttggggggttttcaatggaaattcacgttgctttgcatttctgtgtccgtctttggtcagttgtgcaagcctgctcactgtcatgtgaagatggcctttcatctggcttctctctcttaagtgagaaagattgtccttcaggggacatgacatcaataggtttctggaatgagggactctttctccccgtgttttgctttgtgttcacattttcttttctaatggcattgaaactttaaaaaaaatggattcaactgtttttgcagaatgtagaaagtattctgtgtccttggttaaagaaatccacttgtgaagtgtgcctggaaaatgaaagtttgtgttttttaaagaggaatatttgaaactgctttctatgcatgcttagctggagaaaagtacaggcaggcgtcccatctcccagccacttctcaaaggtgctgctgtgttttaaagaccaggtacagccagggcagtatttgcaaggacattcctgcttactttatccctttggttggaaagctctagatgattcccgcagctcctccagaccccgcctccctgccctccccagctggtctgggaagaggtggtctgctgacctgtggtatctcagaggggacgttcctcctcctccctgtgcaccaggtgggctgcaccctcctgcctattcaggatgtggatgccacaggagagcagcaggcagtggaaacttcagttgcactggttctcctggtggcaaaggcatgaagcacaggggtcgattaatccaggctactagaaagctccagagcaaagtgtgcgggtcccacaaatgcttggctggtggggtctggatcagtgctgagatagagttggcagaagaagcagaggcactctgcttgctttcctagccagtcctcccctacacacacacacacacacacacacacacacacacacaatctcagctgcgccattctgtgcaatcccagtgaccaaatcccttccttgcccacctctatgtcagcaggactgaccacatcactcccccgagttcccaccaccagcatttcctccaacctttttccatcacaaccagttagaaccctacaggcaacaaggccttctagaatccgcttaacccttggctgataacaggcaaatttcagtctgctacactttgttaggtccagaaggagctgcccatactactttcttatgagcatgctcagtatggcatatggacatgtaatgtcacatctttgtggagtgtgattttcttttttcacatatttgtatgcagtagagagcctgttgtagaaaacgctccctgtatcttgctgtactgttaaagaaagctgaattccacattgccaacaaaagcgtgaaaatgttcatgaaccttcctccaggaaaagccattcaagcctgattatttttctaagtaacttcaattaaattgaagaaaaaagaa

SEQ ID NO: 1990 - DNA, 4125 bp, HOMO SAPIENS
cggctatccgcgcgggagtgcgccacgcggggccggagcgcctattagccgccaggacctcggagcgccccgaccacccctgagcccctctggcttcggagccccccagcaccccttcccgggtcccctcgcccaccctaatccactctccctccctttcccggattccctcgctcaccccatcctctctcccgccccttcctggattccctcacccgtctcgatcccctctccgccctttcccagagacccagagcccctgaccccccgcgccctccccggagccccccgcgcgtgccgcggccatggcggccgtgcgcggggcgcccctgctcagctgcctcctggcgttgctggccctgtgccctggagggcgcccgcagacggtgctgaccgacgacgagatcgaggagttcctcgagggcttcctgtcagagctagaacctgagccccgggaggacgacgtggaggccccgccgcctcccgagcccaccccgcgggtccgaaaagcccaggcggggggcaagccagggaagcggccagggacggccgcagaagtgcctccggaaaagaccaaagacaaagggaagaaaggcaagaaagacaaaggccccaaggtgcccaaggagtccttggaggggtcccccaggccgcccaagaaggggaaggagaagccacccaaggccaccaagaagcccaaggagaagccacctaaggccaccaagaagcccaaggagaagccacccaaggccaccaagaagcccaaagagaagccacccaaggccaccaagaagcccccgtcagggaagaggccccccattctggctccctcagaaaccctggagtggccactgcccccaccccccagccctggccccgaggagctaccccaggagggaggggcgcccctctcaaataactggcagaatccaggagaggagacccatgtggaggcacgggagcaccagcctgagccggaggaggagaccgagcaacccacactggactacaatgaccagatcgagagggaggactatgaggactttgagtacattcggcgccagaagcaacccaggccacccccaagcagaaggaggaggcccgagcgggtctggccagagccccctgaggagaaggccccggccccagccccggaggagaggattgagcctcctgtgaagcctctgctgcccccgctgccccctgactatggtgatggttacgtgatccccaactacgatgacatggactattactttgggcctcctccgccccagaagcccgatgctgagcgccagacggacgaagagaaggaggagctgaagaaacccaaaaaggaggacagcagccccaaggaggagaccgacaagtgggcagtggagaagggcaaggaccacaaagagccccgaaagggcgaggagttggaggaggagtggacgcctacggagaaagtcaagtgtccccccattgggatggagtcacaccgtattgaggacaaccagatccgagcctcctccatgctgcgccacggcctgggggcacagcgcggccggctcaacatgcagaccggtgccactgaggacgactactatgatggtgcgtggtgtgccgaggacgatgccaggacccagtggatagaggtggacaccaggaggactacccggttcacaggcgtcatcacccagggcagagactccagcatccatgacgattttgtgaccaccttcttcgtgggcttcagcaatgacagccagacatgggtgatgtacaccaacggctatgaggaaatgacctttcatgggaacgtggacaaggacacacccgtgctgagtgagctcccagagccggtggtggctcgtttcatccgcatctacccactcacctggaatggcagcctgtgcatgcgcctggaggtgctggggtgctctgtggcccctgtctacagctactacgcacagaatgaggtggtggccaccgatgacctggatttccggcaccacagctacaaggacatgcgccagctcatgaaggtggtgaacgaggagtgccccaccatcacccgcacttacagcctgggcaagagctcacgaggcctcaagatctatgccatggagatctcagacaaccctggggagcatgaactgggggagcccgagttccgctacactgctgggatccatggcaacgaggtgctgggccgagagctgttgctgctgctcatgcagtacctgtgccgagagtaccgcgatgggaacccacgtgtgcgcagcctggtgcaggacacacgcatccacctggtgccctcactgaaccctgatggctacgaggtggcagcgcagatgggctcagagtttgggaactgggcgctgggactgtggactgaggagggctttgacatctttgaagatttcccggatctcaactctgtgctctggggagctgaggagaggaaatgggtcccctaccgggtccccaacaataacttgcccatccctgaacgctacctttcgccagatgccacggtatccacggaggtccgggccatcattgcctggatggagaagaaccccttcgtgctgggagcaaatctgaacggcggcgagcggctagtatcctacccctacgatatggcccgcacgcctacccaggagcagctgctggccgcagccatggcagcagcccggggggaggatgaggacgaggtctccgaggcccaggagactccagaccacgccatcttccggtggcttgccatctccttcgcctccgcacacctcaccttgaccgagccctaccgcggaggctgccaagcccaggactacaccggcggcatgggcatcgtcaacggggccaagtggaacccccggaccgggactatcaatgacttcagttacctgcataccaactgcctggagctctccttctacctgggctgtgacaagttccctcatgagagtgagctgccccgcgagtgggagaacaacaaggaggcgctgctcaccttcatggagcaggtgcaccgcggcattaagggggtggtgacggacgagcaaggcatccccattgccaacgccaccatctctgtgagtggcattaatcacggcgtgaagacagccagtggtggtgattactggcgaatcttgaacccgggtgagtaccgcgtgacagcccacgcggagggctacaccccgagcgccaagacctgcaatgttgactatgacatcggggccactcagtgcaacttcatcctggctcgctccaactggaagcgcatccgggagatcatggccatgaacgggaaccggcctatcccacacatagacccatcgcgccctatgaccccccaacagcgacgcctgcagcagcgacgcctacaacaccgcctgcggcttcgggcacagatgcggctgcggcgcctcaacgccaccaccaccctaggcccccacactgtgcctcccacgctgccccctgcccctgccaccaccctgagcactaccatagagccctggggcctcataccgccaaccaccgctggctgggaggagtcggagactgagacctacacagaggtggtgacagagtttgggaccgaggtggagcccgagtttgggaccaaggtggagcccgagtttgagacccagttggagcctgagtttgagacccagctggaacccgagtttgaggaagaggaggaggaggagaaagaggaggagatagccactggccaggcattccccttcacaacagtagagacctacacagtgaactttggggacttctgagatcagcgtcctaccaagaccccagcccaactcaagctacagcagcagcacttcccaagcctgctgaccacagtcacatcacccatcagcacatggaaggcccctggtatggacactgaaaggaagggctggtcctgcccctttgagggggtgcaaacatgactgggacctaagagccagaggctgtgtagaggctcctgctccacctgccagtctcgtaagagatggggttgctgcagtgttggagtaggggcagagggagggagccaaggtcactccaataaaacaagctcatggcaaaaaaaaaaaaaaaaaaaaaaaaaaaaaaaaaaaaaaaaaaaaa

SEQ ID NO: 1991 - DNA, 6524 bp, HOMO SAPIENS
gcggggcggaacgcgccgggcgggctccaccgcgccgtgtgcttccgcaggttgcgggggtcgctggggccttgtggcggggcagctccgcggggcttcgcccgctctctcacctcgccgtgctctctcgcggcggccggcggggcccgcgctgcagccggagacccggagaaaggtgaagaactgaatgtcatcatgtctggaatcaagcgaaccatcaaagaaaccgaccctgattacgaggatgtatctgtggcccttccaaataagcggcataaagcaattgagaattcagctcgagatgctgctgtgcagaagattgagactattatcaaagaacagtttgctcttgaaatgaagaataaggaacatgaaattgaagtcattgaccagcgactgattgaagcaagaaggatgatggataaactgcgtgcctgcattgtagcaaactactatgcttctgcaggtcttctaaaagtttctgagggatcaaagacatgtgatacaatggtttttaatcatcctgctatcaagaaatttttggaatcaccatctaggtcatcatctcctgccaatcagagagcagaaacaccatcagccaatcattcagaaagtgattctttatctcagcacaatgacttcttatctgacaaagataataacagcaatatggatatagaggaaagactctcaaacaacatggagcagagaccaagccgaaatactggaagggatacttctagaattactggctcccataaaacagaacagcggaatgctgatctcacagatgagacttcacgactttttgtaaagaaaacaatagtagtgggcaatgtgtccaagtatatacctccggataagagggaagaaaatgaccagtcaactcataagtggatggtatatgtccgagggtcccgtagagaacccagcattaatcattttgtcaagaaggtttggttcttccttcatcctagctataaaccaaatgaccttgtggaagttagagagcctccttttcacctgaccagaagaggctggggtgagtttcccgtcagagttcaagttcattttaaggacagccagaacaagcggatagatatcatacataatctgaagctggatagaacttatactggcttgcagactcttggagcagagacggtagtggatgttgaactccatcgccattctctcggagaagactgtatctatcctcagtcctcggagtctgacatctctgatgcccctccatctttgcctttgaccattccagccccagtgaaagcttcttcaccaataaagcagtcacatgagccagtacccgatacctctgtggagaaaggattcccagctagcactgaagctgaacgacacactccgttttatgctttgccatcttcattggaaagaacacccaccaaaatgactacatcccagaaagttaccttttgttcccatggcaattcagctttccagccaatagcatcaagctgcaaaattgttccacaaagtcaggttcctaatcctgagtcacctggaaaatccttccagcccatcaccatgagctgcaagattgtgtcaggttccccaatatcaactccaagcccatcaccattgcctcgaaccccgacttccactccagtccacgtgaagcaaggcactgccggctctgttattaataatccttatgttatcatggacaagcagccggggcaggtgattggagccaccactcccagtacaggaagtcctacaaacaagatctccacggcttctcaggtctcccaaggaacaggttcccctgttcctaaaattcatggaagtagttttgtaacatctactgtcaagcaggaggattctttgtttgcatctatgccacctctttgcccaattgggagtcaccctaaggttcaaagccccaaacctataacaggaggacttggagctttcacaaaagtgatcatcaaacaggaacctggtgaagcccctcacgtgcccgcaacaggagctgccagccagtcaccactcccgcagtatgtgactgtgaaagggggtcacatgatagctgtgtcccctcaaaaacaggtcataactcctggagaagggattgcccagtcagcaaaggttcagccctccaaggttgtcggggtaccagttgggtctgctttaccttcaacagtgaagcaggctgtggcgatcagtggtggccagatcctggtagccaaggccagctcttctgtctccaaagcagttgggccaaagcaagttgtaacccaaggagttgccaaagcaattgtgagtggaggtggaggaaccattgttgctcagccagtgcagaccttaaccaaggcccaggttactgccgctggtcctcagaagagtggatcccagggttcagtaatggcaacgttgcagctaccagccactaatttggccaacttggcaaatttgcctcctggcactaaactctacctaactacaaacagcaagaacccttcaggaaaaggaaaactgctgctgatccctcaaggagccatcctgcgagctacgaacaatgctaatctccagtctggctcagctgccagtggtgggagtggtgccggaggaggaggaggaggaggaggaggaggcggcagtggcagcggtggaggcggcagcacaggaggaggaggaggaacagcaggaggaggaactcaaagtactgctggccctggagggatatctcagcacctgacttacacatcttacatcctcaagcaaactccccagggcacatttttagttggccagccatcaccccagacttctggaaaacaactcaccactgggtcagtggtccaaggaacactgggagtcagcacatcttctgcacaaggacaacaaacgctaaaagtcatctctggacagaaaaccacattgtttacacaggcagcccatggaggacaggcatctctaatgaaaatatccgatagcaccttgaagactgtgccagccacctcacagctctcgaagcctggaaccacaatgctgagagtagcaggaggggttatcacaactgccacttcccctgccgtggccctctcagcaaacggtcctgcacaacagtctgaaggaatggctcccgtgtcttcatctacggtcagttctgtaacgaaaacttctgggcagcagcaagtgtgtgtgagccaggccaccgtgggaacctgcaaggctgccacccccaccgtcgtcagcgccacgtccctcgtgcctacaccaaaccccatctctgggaaagccacagtatccggactgttaaagattcactccagtcagtccagtccgcagcaggccgtcctgacgattcccagccagctcaaaccactcagcgtaaacacatctggaggggtgcagacgatcctgatgcctgtgaataaagtggttcagtcattttctaccagcaagccacctgccattctgcctgtagctgccccaactccagttgtccccagctctgctccagcagctgttgcaaaagtgaagactgaaccagaaacacctggaccgagttgcctctctcaggagggtcagacagcagtgaaaacagaagaaagttctgagctgggaaactatgtcattaagatagaccatttagaaactatccagcaactcctaactgcagtagtaaagaagattccattaatcactgcaaaaagtgaagatgccagctgcttttctgcaaagtctgtggagcagtactatggctggaacattggaaaaaggagagccgctgagtggcaaagagcaatgacaatgcgaaaagtcttacaagaaatcctggagaagaatccgagatttcaccacctgactcccctcaaaaccaagcacatcgctcactggtgccgctgtcatggctacaccccaccggaccctgagagcctgaggaatgacggggactccatcgaggacgtgctgacccagatcgacagcgagcccgagtgcccatcatcattctcctctgctgacaacctctgccgcaaactggaggacctgcaacagttccagaaaagggaacccgagaatgaggaggaggtggacatcctcagcctctccgagccagtgaagataaacatcaagaaggagcaggaagagaaacaagaggaagtcaagttctacctgccaccaaccccagggtctgaatttattggggatgtcacacagaagattgggatcaccctgcagcccgtggcactccacaggaacgtgtatgcgtccgtggtggaggacatgatcctgaaggctacagaacagctggtgaatgatatcctgagacaggctttggcagttggataccagacagcttctcacaacaggattcccaaagaaattacagtgagtaatattcaccaggccatttgcaacattccttttctggacttcctcacaaacaaacacatgggaatattgaatgaggaccagtgagcggagtgaggtgccctggagaagcaggctttgaaggcacagcgaagctgtaactgaggaccctgctgctcgggaaggaggtggtttccagtgtgactcggcatgtcatggctacccaacctttgccgctgcctgttcccacgtgtcaccagcacgctgcactccagatgaaatcctcctaggacaggagtttgtttcctgagtgtggagtgaggctgtcagtggatccgtgctttgtcggccagcgtttctgcagtctttgtaaaggccccacgagagcgggccaggccgtgtgcctcaggcccttctccctgggtgtgcttaagggggctccttgggcccgcctccccaggaggtagaaaatgagtggcaggctagagatttcacccattttgtgggctggagttaccagtagctccagcagttaccctgaagagagattgggcttcagccttcagcaggtggttctctcccatgcctggccttggtgtggaggggctgtactctgagcccaagtgagtcagctataggaagaggccatacctagagccaagaaccatgaaggcctgagagacggcagactgagcagaattccttttttgagcacgagagcattactagaaccattgtcaaagcagtggcaagggacggagaggtcccaacaggagtcaggaagaggtttgattataaccaagaaaactcactatgctaggaatagactgtgtgcaccagtcccagacacttggcagaagtgtagcagcgttacacatgtgtgcgaagcagatcgcaggttccacgccatctgcatggcctgcaggagcttctgctgctgaccccatgctgagtggccagtggggagcggcgcccggcaggctcttctggggtcgtctgtcctatccgtggattgtatatactcttctctgttaaggagtttttcccaagaagaaaagtatttaaaagaaataccagtgagtgccttaaagttggagaagtaactgcccatgcccagaaataaggatgccagtgcccagaagcagtgagattagtctgtgtccacaagcagaggccccctcgatgggagggagtggcaggcaggagaaggtggcgctgccaggtgcccgggtctattggaggcgccccatctcagacttcctaacacagcctgtgtggaaggcagaacaaagaatgcatgcccagtcagaaatctgttctattctgctccaggaaaatcggaaacctgtgagtcagagtcagagaaacttacccaagcaacgtaattcctgttttcatgggtcctgtagatgtttgagtcaggaaggtaaggcggggagtgactgaataaactctgccttttaaattgagcatctgggccgggcatggtggctcacgcctgtaatcccagcactctgggaggtcgaggtgggtgggtcacctgaggttgggagttcgagaccagcccgaccaacatggtgaaaccccgtctctactaaaaatacagaaaattagctgggcatggtggtgtgtgcctgtaattccagctactcgggaggctgaggcaggaagaatcacttgaacccaggaggcggaggttgcagtgtgccaagatcataccactgcactccagccctggtgacagaggagaccccgtctcaaaaattgattgatcaattcagcatctgagggctgcaagtacagaaggaatctattctcagcagggcatagggcacgcactggcttaacagtttagtatataaggctcaaatagtctatacctgaactgctataagcaaggtcgatagggaagtggatagattgcttcagcaaagtgaactgtgagatctccaggacagagggagaaagatctgatccaaatgagaacagattggttattgcaggtatcacagcctaaagaaattatctttttgcaaaagaaatattaaatgatttagcagtctccacgtgtgttaatgtttcaaacgtgtatcataatgtgtataattgtgtaacaaaattgtctacaataaatcttttggtatttgtggaaaaaaaaaaaaaaaaaa

SEQ ID NO: 1992 - DNA, 4492 bp, HOMO SAPIENS
agatctgactggccaacgtcgggcggaagtcgggaggttgggtggtctgtaaacgctggcttgtgacagggagggggaggaggaaggccttcgtaaaggttgcatctccgtcccttcgctcccggggacccgcgggaaaaaaaaaaatccaacacccaggccccgcggctagccccttcccacaggctctctccgctcgattttgtcaccgttatgtgggaagcgaatccagagatgtttcacaaagcagaagaattattttctaaaacaacaaacaatgaagtggatgacatggacacgtcagatacccagtggggctggttttacttggcagaatgtgggaagtggcacatgtttcagccggataccaacagtcagtgttcagttagcagtgaagatatcgaaaaaagcttcaaaacaaacccttgtggctccatttcttttactacttccaaattcagctacaagatagactttgcagaaatgaagcaaatgaatctcaccactggaaagcagcgcttaataaaaagagcccccttttctatcagtgctttcagttacatctgtgaaaacgaggccatccctatgccaccacactgggagaatgtgaatactcaagtaccatatcagcttattcctctgcacaatcaaacacatgaatataatgaagttgctaatctctttgggaagacgatggatcgcaaccgaattaaaagaattcagagaattcaaaacctagatttgtgggagttcttttgcaggaaaaaggctcagctcaagaaaaaaagaggtgtgcctcagattaatgaacaaatgctgtttcatggtaccagcagtgaatttgtggaagcaatctgcattcataactttgattggagaataaatggtatacatggtgctgtctttggaaaaggaacctattttgctagagatgctgcttattccagtcgtttctgcaaagatgacataaagcatgggaacacattccaaattcatggtgtcagcttgcaacagcggcatctgtttagaacatataaatctatgtttcttgctcgagtgctaattggagattacataaacggagactccaaatacatgcgacctccttccaaagacgggagctatgtgaatttatatgacagctgtgtggatgatacctggaacccaaagatctttgtggtttttgatgccaaccaaatctatcctgagtacttgatagactttcattgatttcacttccaaatctcggtggtcaaggaagctttattcttttttgcaggaaggtttgctcttcagtcatctagccactaaatgttaattatctgatacttttgaaacagatatgaaaaaaagtggcctccatataaaaagacatactgacttcaaggttggtttttgttgttttgtttttgcctgtttcttgtagtcttgtttgttaaaagttgatatcattgatgttttaacacataggggtgaaagataccattcaaaatggaatcagctgagtctcaactaatgtggtcattgagatctttaaagtttacgtgtgtgttatcaggataaatgattttagtttaaatagacttattcgtataaatgttgaaaaaaaatacagacataaatgtgtccctttagaggaattgatcctttgtaaattgaattcaggtagtagtatcatccaccaatccatctgttgctttgttggtcttctgaaggggggatttaaaactctgaaacagtctgagcaccttgagagaaatcagaaacaagacaattatttgcagtgctgtcaaacaagccagaaggagaaaatcaaggtagaatgccccactttccagttgccttaggatagcaggctgcagcctcagacttgatcctgtcattctcctctgtctcccacatctgaattgataattgctgcaaaatgtcattagcctacacttcatccatcagggctcttggattcttacaccacgacttgctgtgcaaggtgtttattgcatcttcaaagtgaaactttaaattattattcaaacatttattttccttttgttttaaaaagagtccctacaatgatcacttctaagatttttttttaccttcccctctgcagcacacacagctattcaacaatgatttctaaaattcatatttcaaatttgtatctctccattttgaaacattatagaaagcatgggatgcttgagacaaatctggtttctcctttgaagtagctgttgacaacctactctcttgaaaagttagatataattcttaatcatgtttagtggaaatttgtttacctgttccatctgttttgctgtttcattgtaaggaagatgagaagtgttggaacagcttccctcccctaaaggtattctagcagaggcgagacagcaacttggcgggcatgttgcataggagttaagtaccagatggggaattgcccatgtgatggtgaagagtctctcacattgattttcttccttttctcctcttctctcctccttctcttctctcctctttctcttctcttctttctcttctcttctgtcttcctcttcctcttctcttcctctcctcttcctctttctctctcttcctttttctcttcctctttctctttctctttctcttctcttctctctctcttccttccttctttctttccttccttccttccttccttccttccttccttccttctttccctccctccctccctccctcctccctttttctttttctttctttttttttggtttggcagagtcttgctctgttgcccaggctgcagtgcagtggtgtgatctcggctcactgcaacctccacctcccgggttcaagcaattctcttgcctcagcttctccagttactgggactacaggtgcataccaccatgcccggctaatttttgtatttttagtagaggcggggttttgtcatgttggccaggctgatctcaaactcctgacctcaggtgatccgcctgcctcagccttccaaagtgctgagattacaggcatgagccgctgtacccggcctgattttctatgattctgcctttaaaagacagcacgtataccaagcctttttcagaaagcttttctcttaactccttctaatgctgaattttctctctattatcctcacccaattttggctgagagttagtgtacacaatttaacttcttagaaaaattccagtgtctatgcttatattgctcacttgaatcatttgaattagaaagggatctacaaataataaaagcaaagagtgcagacagattagggatagtaattcttaaagtgccatctatcccagatttccgttatagaccagcatatgtgtaattgtgcagtgggaggtaagtagtacccaggacattgcatgtacaatactttgaaacaaagtggcaacaaagatttcctggctcaggtatgcaccccagctgctggtttagatgaagtgctgagaatatttagaaaaagcgctttaaaaagcatctagagattatcatgaaaataattggagacaaagtcactaggctgctttgtgagaggcagcataccatggctctaaacccgttcacaaaaaacaatgttagagacattaggaattcaggttttgaaaatctttttttcgatttatttgtaatttacataccaaaaaaccacattaaaatagtcctcccttcaacatggctatcttttttcaagttttatatgcatagctctctcagcacttgaatggaaaaactgttacagcatttgggagttgtttttcttttagactttgcagatcttatctcaaggtgactaggaacccagagctaagtatctgtgaggcaatctctgcgaacgctgaacttacctagttggtttctatgaaatatgtagaatgcactgcagtagccattgtaagaaggtactataccggttttttggggcttgttgttgttgtttggtctgagaatgtactgccaacccctcttttataagagagaactgattttgatacatattttaaaatatgatagtacagagttaatggatgttaaaattttatttctttgttttggtaagtagattaaatcgagaatcatataatcagtacatttgagaattatataaccagtatataataatactggacacaaccatttgccatcttttcctgttatcatcccatagagtgggtggggagaatgaatagacataaacctagaataatgataaatggtttttaaaactctatattgaatacattccagctgataatgacttttctttttcaccttggtgatatcagcctcagggtaaaaaaaaaagtttcataaatcttttagttataaacaggaaagttttatattagtgtgtcatttcatttctagactgttgatggtgatgatgataaagaatttggagccaattttgatatatgaatgtattgcttttacatgtgatgattaaagctctccattagcagtt

SEQ ID NO: 1993 - DNA, 2586 bp, HOMO SAPIENS
atgaacactaagcatcgtttccaactgctcatagctgtggcagattgcttggaagagggtgggagttgtacacgccaagtccaagtcaaagctctaaagaccattgtggacttctgctttgtgtctttgtccgtgaccatgaggtcactctcctgccgacctagaatctccgcacagggcttagcttgtgctgcccagaaccccccaggagccgccctccgagggaactctcagcttctcacagacaggcactgcttctgcctgctgagtctggcccttgtgagggtgtgcagtgtgcggtgtggggtgctgtgcggtgtggtgtgcatgtctgagtatcttgcttcggtgctctcctgcaaatccctgccctctgctgctggactagaggcctccagcaccctccctgacatgttcctccaggagaggacacagctgtctcctgagactccggtgccctccacctccgcgatcctcagatgcttccctggggagacacgacctctgcacctgtgcaaggaaggccctgtctggaaggaggtttctggtcacctcaagatggtttctccaagctcaggagaatggaagttgccccatccccaggccacaggttctgcactgctaaagctgtggtggatgcactgtggggatctggaattttgcctcttacagaaggaagtgaagcccttcccaattaccagtgtggctgcggataagtcccacactgtcgagttgaccccagaagagactggagagagccggagggactggtctcccctcaaggcccgaagcaggactggcaccagcgaaggtgacaaccctcacaccaacaactgcacctactttcttacagggttggatgcctataacatgcctgcatggatttttgtcaaccgcagcctggcgctggggaagattcgttgctttggcttcgacatggactacactctggctgcctacaagtccccagcttatgaggccctgaccttcgagctgctgctggagcgcctggtgtgcattgggtacccgcatgagatcctgcgctacacctacgaccccaccttccccaccaggcggctggtgttcgatgaactctatgggaacctgctgaaggtggacgcccacgggaatgtgctgctgggtgcctatggcttcaccttcctctcggaggcagagatctggagcttctaccccagcaagttcattcagagggacgacctgcagtgtttctacatactcaacatgctcttcaacctgcctgaaacctacctctatgcctgcttggtggacttcttctctggctgctcccgttacactaattgtgacaccggctatcagcatgggaacctcttcatgtccttccgaagcctcttccaggatgtgactgatgccatgaataacatccaccagtcgggctgtctcaagaagaccctggaggacttggagaaatatgtgaagaaggatccacgcctccccatcctgctggggaagatgaaggaggttgggaaagtgtttctggccaccaacagcagctacaactacaccaatgccatcatgacctacctgttcagcatcagtgaggctgaagcctcgggcaggccctggaggtcctactttgacctgatcgtggtggacacgcagaagccccacttctttgcagaggggttggtcctgaggcaggtcaacacggactcaggaaagctccacgtgggcacctccacagggccccaccagcactgtgctgtctactctggaggctcttcggacatggtgtgcgagctgcttggggttcgggggatggacatcctgtacattggggaccacatttttggggacattctcaagtccaagaagcgtcagggctggcggacttgcctggtggttcctgagctgtcctgggagctggacatctgggcccaggagaaggagcggttggaggagctgaagagactggacacgcacctggcagacatataccagcacatggatgggagcagttgtgagctgcaagtcatcaacttcaccaagagagagatccagatgccacatgagtcagttgtggagcaagaacaggccaatctagaccctgcctcctgcctcctctcctgcaaccagaggtctcttccagcaaagagctgtttgtcttctgccatctaggattccaaggaagtgggacactccagtctaggctgttttggtggaaacaacctttgttcagtattgagtagtgcatttacttgtaataatacaaataagtcagctgatgacaatggctgaaagggccaggtcatggaaaccaagaagtgagaagcatttcaggggatgattcttttcttctttttcctatatgtcctggatgatttttactggtacagctagagaagatgaatttaaattcaaaaataatagtaccttctgtggttctgtttgagtcttgcaagatattaagaacaactttccgcaactcttgtattggctggaaggaaggaagaaaacatacaaaatcttaaaaacattcatgcaaaaaatttgctaaggaactttaacttcaaatacatgttttataataaaagtttccttttaaaa

SEQ ID NO: 1994 - DNA, 1912 bp, HOMO SAPIENS
cccaggcgccccggccttattccagcctggggagcgcctcggtggggagcacgggacagcgagggaggccgaggcgggggccctgggcgcccgatatctccgaaccggggaggcggccccgattccgagagccggaacgcagggaaaggcaaggacggggcggccggcggaggggcgggcgccgctcatcagccacgccagtcacgtctggggccaccggctgcctttttcttcctttccccctttgctttcttccccctccgctgttggcgagggcaaagtggccgtggcggcgccatgcccgggccggagtgagtgcgcgcgggcgaaaatggcgtacatccagttggaaccattaaacgagggttttctttctagaatctctggtctgctgctgtgcagatggacctgccggcactgctgtcagaagtgctacgagtccagctgttgccagtcaagtgaggatgaagttgaaattctgggacctttccctgctcagacccctccctggctgatggccagccggagcagtgacaaggatggtgactctgtccacacggccagcgaagtcccgctgaccccacggaccaattccccggatggaagacgctcgtcctcagacacatccaagtctacatacagcctgacgcggaggatttcgagtcttgagtcaagacgtcccagctctccactcatcgatattaaacccatcgagtttggcgttctcagcgccaagaaggagcccatccaaccttcggtgctcagacggacctataaccccgacgactatttcaggaagttcgaaccccacctgtactccctcgactccaacagcgacgatgtggactctctgacagacgaggagatcctgtccaagtaccagctgggcatgctgcacttcagcactcagtacgacctgctgcacaaccacctcaccgtgcgcgtgatcgaggccagggacctgccacctcccatctcccacgatggctcgcgccaggacatggcgcactccaacccctacgtcaagatctgtctcctgccagaccagaagaactcaaagcagaccggggtcaaacgcaagacccagaagcccgtgtttgaggagcgctacaccttcgagatccccttcctggaggcccagaggaggaccctgctcctgaccgtggtggattttgataagttctcccgccactgtgtcattgggaaagtttctgtgcctttgtgtgaagttgacctggtcaagggcgggcactggtggaaggcgctgattcccagttctcagaatgaagtggagctgggggagctgcttctgtcactgaattatctcccaagtgctggcagactgaatgttgatgtcattcgagccaagcaacttcttcagacagatgtgagccaaggttcagacccctttgtgaaaatccagctggtgcatggactcaaacttgtgaaaaccaagaagacgtccttcttaaggggcacaattgatcctttctacaatgaatccttcagcttcaaagttccccaagaagaactggaaaatgccagcctagtgtttacagttttcggccacaacatgaagagcagcaatgacttcatcgggaggatcgtcattggccagtactcttcaggcccctctgagaccaaccactggaggcgcatgctcaacacgcaccgcacagccgtggagcagtggcatagcctgaggtcccgagctgagtgtgaccgcgtgtctcctgcctccctggaggtgacctgagggctgcagggaaggcagctttcatttgtttaaaaaaaaaaaaaaaagacggaaaaaaatgtgtcacatactattacatccacacctgcatacacactcgcaacatgtctacacacgtccacacacacagacacacagataccccaaatcctctca

SEQ ID NO: 1995 - DNA, 2010 bp, HOMO SAPIENS
acgtgatccacccgcctcggcctcccaaagtttttggattacaggtgtgagccacctcgcccggtcctatctctctttcttctctttctccctctcactttgtttctcttctctctctctctcccgcctccttcccccgtctcccctcccttccccccaccgccctcttcatagctgagcctgtccggcagtgcggcggatgtacggatgattcagtggctggcaggaagcccgccctgcccgcccgccagtgtcagtggtgttggcatcagcttgggcaggtgtgcgggctcaggatggggcggccgtggtgaggaaccctggactctcagcatcacaagaggcaacaccaggagccaacatgagctcggggactgaactgctgtggcccggagcagcgctgctggtgctgttgggggtggcagccagtctgtgtgtgcgctgctcacgcccaggtgcaaagaggtcagagaaaatctaccagcagagaagtctgcgtgaggaccaacagagctttacggggtcccggacctactccttggtcgggcaggcatggccaggacccctggcggacatggcacccacaaggaaggacaagctgttgcaattctaccccagcctggaggatccagcatcttccaggtaccagaacttcagcaaaggaagcagacacgggtcggaggaagcctacatagaccccattgccatggagtattacaactgggggcggttctcgaagcccccagaagatgatgatgccaattcctacgagaatgtgctcatttgcaagcagaaaaccacagagacaggtgcccagcaggagggcataggtggcctctgcagaggggacctcagcctgtcactggccctgaagactggccccacttctggtctctgtccctctgcctccccggaagaagatgaggaatctgaggattatcagaactcagcatccatccatcagtggcgcgagtccaggaaggtcatggggcaactccagagagaagcatcccctggcccggtgggaagcccagacgaggaggacggggaaccggattacgtgaatggggaggtggcagccacagaagcctagggcagaccaagaagaaaggagccaaggcaaagagggaccactgtgctcatggacccatcgctgccttccaaggaccatttcccagagctactcaacttttaagcccctgccatggttgctcctggaaggagaaccagccaccctgaggaccacctggccatgcgtgcacagcctgggaaaagacagttactcacgggagctgcaggcccgtcaccaagccctctcccgacccaggctttgtggggcaggcacctggtaccaagggtaacccggctcctggtatggacggatgcgcaggatttaggataagctgtcacccagtccccataacaaaaccactgtccaacactggtatctgtgttcttttgtgctatgaatttggattcctaattgctattgttggttgctggggttttaaatgattgataagcttgtacagttaacttatagagggggagccatatttaacattctggatttcagagtagagatttctgtgttgtctcctagaaagcattacatgtagtttatttcagcatccttgttgggtggggccctggctctcttcccctttggtgggacctcccctttctttgggcttcagttcactcaggaagaaatgaggctgtcgccatctttatgtgcttccagtggaaatgtcacttgctacagacaatagtgcatgagagtctagagaagtagtgaccagaacagggcagagtaggtcccctccatggccctgaatcctcctctgctccagggctggcctctgcagagctgattaaacagtgttgtgactgtctcatgggaagagctggggcccagagggaccttgagtcagaaatgttgccagaaaaagtatctcctccaaccaaaacatctcaataaaaccattttagttgaaaagcaaaaaaaaa

SEQ ID NO: 1996 - DNA, 240 bp, HOMO SAPIENS
  misc_feature (57)..(57): n is a, c, g, or t
tggaggagcgggttgtaggcccttccgcctctggtgggtggggagaagcaggggagnctggtgttcagctatattctacaaagaaggggtggatcctgagaggcaagggtgggactgaggcctagttacaggtggtcgggaaggaggttgaaggggaactgtgtgaccttggatgttctttgtaattatcttatgcttagctgacacatctgtaaaatggagatagcagcacccacttct

SEQ ID NO: 1997 - DNA, 2173 bp, HOMO SAPIENS
atctttccgtcccgggcagccagcgccagtcggagccagcgcgagccgccgccgccatcactgccgctgccaagtcctccacccgctgcccccgccatgtctgctaccgctgccacggccccccctgctgccccggctggggagggtggtccccctgcaccccctccaaacctcaccagtaacaggagactgcagcagacccaggcccaggtggatgaggtggtggacatcatgagggtgaacgtggacaaggtcctggagcgagaccagaagctgtcggagctggacgaccgtgcagatgcactccaggcgggggcctcccagtttgaaacaagcgcagccaagctcaagcgcaaatactggtggaaaaacctcaagatgatgatcatcttgggagtgatttgcgccatcatcctcatcatcatcatagtttacttcagcacttaaatccccgaggagtctgccctgcctagagaagggcctctcccccaaccctcagccgttcctccacctctcagccatatctttcagcccccactcccctggatccgtgtgtgtgtgtgtccgtgtgtgtgtccccctgtaaatagccagctgttatttatacatatataatattatatatatttggtctgtttgtagttttattactagatgatttttccggttgtccttaacaccccttcctgaggttcccttcacccctctctcttgccttccttccctttccctttcttcctgactagccccaagtcccttcatttgcatctgctatgcaatagtccctctcctttccttcttcttccctcagatttagctgatccttcctcccaccctggccttcctttcctctttcctcctcactctccccgtcatgctccctctgccccgccctcaaaaaaaaaaaaaaaaaaaaaaaaacaacagcacctgtccaggcttccttaggtacatcttctttgtatccattgggaggctctgagactggccccacttggtcctaagaatcccaaggtctttgggagcgtccagcatgttaattagcgtatcattacatactgctatccctttccatttctttttgttccatcactcttctctcaacctgtgtttctttttttactgaggagttagtccccattagttcttgtatcacattttcatttgcacgacattactcgcaggtggtggggagcctgggcttttggggaaccaggctgctctggtccccagcattgcctcctcctagcccctctagtccagtttgcctcccttaccctcattttccaaacctcttgtaccctcctctccctcccccagctggtatgtaagtgtcttgaagttcagtatgttatgatggaccaataattctgccacttcgggtttctccctacattcctgctccccagttttcatgtggggtactcaactgacattcccatggggtttccctcccatctgcctgatccacctcctcctcccaccaggagagttgggggttggccacaattgatctcttgtgagaggggtggctaccagtgtgtgtgtgggggtcatcactgccttggggaggagtggggcagggcagagaatccccccaattcctgcctgaaatctctggcctcacccctgctgggggttggactgaaaaccctcctccccaatttggggggtgttgccccatcactgcccagctcctctgactgccccccctgaatttagggtgggggtactagtcactgccaatgtgtgtatgggacttgctggaaaacggggatgcttgcccctctccaggactattgagcccagagagagctgtcctctcattgggtgaactgattgaggaagggtctattgtctttttaaatggcacaattttaagggtttgagggtacagtcccttaacctgccacgggagggggcccccaaactttcttccccccacacttctggttttctgtgtggagggggagcagggatatctaagctgtggtgtgaaagggtaggagagatgctggaggtgggggtgctgtgttttagaccccccatattatcccagtgtcccctgcccccctcttcccccaccccatgcccccaattctgtggcgcatccagattgtgaaaatgtacaataaatgtgtaatgagtaaccaggaaaaaaaaaaaaaaaaaa

SEQ ID NO: 1998 - DNA, 6246 bp, HOMO SAPIENS; identical to SEQ ID NO: 882

SEQ ID NO: 1999 - DNA, 5083 bp, HOMO SAPIENS
agaagagcgatgggagggggtgacgtggcagtgacaggcgcataaactgaaatgaatggcggaaacagcagccaatcggcgatcagattggccgggcattccgcattctcccgtcctccctgagcgctggaaacttcaggaaagcaccaatgagcttccccaaaagtctgattggcctttatctgaaccaatcaaaggtgggtctggcggacgcgtcccaccccaggctctcactgggcgctgtagaatgacaggcccgagagaaatgccaatatccgcggggtcttcctcaagtgacactcagcggcaccaatcgacgtccttcttcccggcggccgagccctcctccccgcggctggccgggcggggcggggacgctgcgcggcggtggctgatgcggtagccgtgtggggcgctccgggcggcgacggcggctctcgtaggcggttccggtcttgtatctccaggcggcggcggctcatggcggcgacggagctgagaggagtggtggggccaggcccggcagccattgcagcacttggcggcggcggcgccggtcccccagtggtgggaggaggcggcggccgcggagatgcggggccaggctccggggccgcgtcagggacggtggtcgcggcggcggcgggaggcccgggcccgggggccgggggagtggcggcggctggcccggcccctgcgccgccgactgggggctcgggcggctcgggcgctgggggttcgggctcggctcgagagggctggctcttcaaatggaccaattatatcaaaggctaccagcggcgatggttcgtgctgagcaacgggctcctgagctactacagatcaaaggcagaaatgagacatacctgccgtggtaccatcaacctcgccacagccaacatcaccgtggaggactcctgcaacttcatcatttccaatgggggtgctcagacctaccatctgaaagctagttcagaagttgagcggcagcgctgggtgacggccctggaactggccaaggccaaagctgtgaagatgctggcagagtcagatgaatcaggagatgaagagtctgtctcacaaactgacaagactgagctgcagaatacccttcggaccctctctagcaaagtagaggacttgagcacgtgcaatgacttgatagctaagcatggcacagctctgcagcgttctctcagtgagctggagtccctgaagttgcctgctgagagcaatgaaaagatcaaacaggtcaacgaacgagccacactctttaggataacatccaatgccatgatcaacgcctgcagagatttcctcatgttagcccagacccatagtaaaaaatggcaaaagtcactacagtatgaaagagaccagcgtatccgactggaagaaaccctcgagcagctggcgaagcagcataatcacctggagagggccttccgaggagccacggtgctgccggcaaacactcctggcaatgtgggttctggtaaagatcagtgctgctctggcaaaggggacatgagcgatgaagatgatgagaatgaattttttgatgcacctgagatcatcaccatgcctgaaaatttgggccacaaacgtactggcagcaatatcagtggagccagcagtgacatcagccttgatgaacagtacaagcatcagctggaggagaccaaaaaggaaaagagaaccagaataccatacaagccaaactatagcctcaatttatggagcatcatgaagaactgcattggaaaagaactctctaagatccccatgccggtaaactttaatgagcccttgtccatgcttcagcgccttactgaagatctggaataccatgagctgttagaccgagctgcaaaatgtgagaattctctagaacagctctgttatgttgcagctttcaccgtgtcctcctactccactactgtcttccgcaccagtaagccattcaacccactgcttggggagacctttgagctggaccgattagaggagaatgggtaccgatccctctgtgaacaggtgagtcatcatccccctgctgctgcgcaccatgctgagtccaaaaatggctggacattgcgtcaggaaatcaaaatcaccagcaagtttcgaggcaaatacctctccattatgcccctcggtaccattcattgtattttccatgcaactgggcaccactacacttggaagaaagttaccacaactgtacacaacattattgtgggcaagttgtggatagatcagtctggcgaaattgatattgtgaatcacaagacaggagacaagtgtaatcttaaatttgttccttatagctacttctctcgggatgtagcaagaaaggtgacgggggaagtgacagatccatcaggaaaagtccactttgctcttctggggacgtgggatgagaaaatggaatgtttcaaagtacagccagtcattggggaaaatgggggtgatgctcgacagagaggccatgaagcagaggaaagcagggtcatgctgtggaaaaggaatcctttaccgaagaatgcagaaaacatgtactacttctcagagcttgctctgactctcaatgcttgggaaagtggcactgcccccacagacagccggttacgacctgaccagagactgatggaaaatggacgctgggatgaagcaaatgcggagaagcagcgcctggaggaaaaacaaagactttccagaaagaagagagaagcggaagctatgaaagccacagaggatggcacaccatatgatccctataaggcactgtggtttgagcggaagaaggaccctgttaccaaggagttaacccatatttataggggagaatactgggagtgtaaagaaaaacaggactggagctcatgcccggacattttctgaaacggcagtaacaaaaaagaggagcatataatggagaagaggacagaggatgtgtgggaaagctggaagttgtgactctcttaccaagtgctttcctcaagtttgtctctcttgaccaatcattttttccaaatcaatcaccagaaggagacaccagtggtggtgattggctggttgccttagctgattgaaactgaaatcgacataggagatactatgtctgtaagggagaggtttagtggccgaaggttagtgttattccacatccacgaagtcaagtattcttggctcttctttctccctctgcccccatttaagacaatgtcactcaccctccccttgtagtatcctgctcagccaagatctgcctaagattatgattcaggggcattttggtgctgttaaaagcaagagccgaatttagaagttcccttaaaaagaaacacataagacttaccaatggaggcattgtgaatggttgcagtggagcttaggtataacatcatcaagtgtgttcacacgcggggtcggtttaatggagtgtccacgcggagataactgcgatattggaacacctgtgagagagattgttctatagggctggaatattcagagttacattcttggaagtttctgtttttacttgcatcaaacacccctctgttgttctccatcatctttaatagcaactggagaccactttggtcattggtaagggggtgcattctcctcacaaaggggttttatggacttcctcaggcggagagcttctgagaacacaggcaggatggaaaaagactactagccacttttgctttcccaaccccccttaatgccatccttcattgtctttctggcttctcttcttctggcacagtaccattttgggtctgtgccccagtgtggagcaaaacattgcctgtcccattctgatatacttcagaatttgagagcagaagttaatgtggaacaaaagttttcaccatctctcaagccccaaggactggagccacctctggaataatgtgttaaatatctgtatattatatatatgtagagaaaaatctaattttttggtttgatttccttcccattaagaatcttgttttttgatacccttgtctccctgagactctttcttggacacgtgttgatgtggatggcactcctgctctccatcttttatgggcagagagatttcaaaacctgagcaggatcatgtctggcagttactaaacagggactttgtccatggtttgtatcatggggtgcctactgctgtctaaactctgctctcctaattagctgactcttgaaaatgaaatcctaacctctttcctgcctcttttctttctcttttcaggaagagtgtgggtagaaagtccggagggcaacttccaatttaattctgctctgtccggcgcataggctgaattccaaaagaactttcttcctaggatgtggggcttaaagcaccgtcatgtggggtggatcagataattgctcctgtggggccctggcttccttctctgtttgtgcagtatttgtttttgttgtcttgttgagaaatatcccctgtgcaacccacccttggttgaggatcacaaattgaggtgccttccttgtatgctttttgttagtattttttgtttttgttccttaactgctgagcctcagccagcgtgggtcctgggggaaataccattccaaaggaagccatccctatggggaaattggttttactgggtaaattaatacttttatttcttcccctatcccttccttcctagttgtgataaacatgggagaggagtgactttgactgctggggaatttcctcctaagaaccttattcccaaaataagccagggattatgtcaaggcttctttcaaggaggctcataaaagcagtgacctcatccggggctttggatagagtgagaattccccaactaaattggacttctctgctttatccccttctcttccttcaccatctgcactacatttctggctgatcccaatcagattcccgctaatggaagaagtttagaatctttcaggtggaataaagtcacatgaaaacaaaacacaactatatatattttcagtttttttgccttattgatttttttccaaaaaaaaaaaactactaaattaaataattttttaaaagtca

SEQ ID NO: 2000 - DNA, 5525 bp, HOMO SAPIENS
gcggccgaggccggggggcggcggcgggcgcccgcaggttcccgagccgctcctgagaaggcgcctgacagcgggccggggcgcacggagaagcgggccgggccggacctgctgggccgcgccgagccaatcgccggcgccggccgctcgatgggcgaggcggcggcggcggcggcgggggccgcgggccgggccgccgctccgaggtgaaggcgcgcgcccctccccgcctgcctcccgggccgcagcgatgaattccgccgagcaaaccgttacgtggctcatcactctgggggtgctggagtcgcccaaaaaaaccatctcggacccggagggctttctgcaggcgtcgctgaaggatggggtggtcctctgcaggctgctggagcgcctgctccccgggaccatcgagaaagtctaccccgagccccggagcgagagcgagtgcctgagcaacatccgcgagttcctgcgcggctgcggggcttccctgcggctggagctcctgtttcctccttcccagcctcctcagcatctggtaaccaccattctcttgtctgcttctacgtttgatgcaaatgatttgtatcaggggcagaattttaacaaggtcctcagttccttagtgactctaaataaagtaacagcagacatcgggctggggagtgactccgtgtgtgcccggccctcgtctcaccgcataaagtcttttgactcccttggatcacagtctttgcacactcggacttcaaaactgttccagggccagtatcggagtttggacatgaccgataatagcaacaatcaactggtagtaagagcaaagtttaacttccagcagaccaatgaggacgagctttccttctcaaaaggagacgtcatccatgtcacccgtgtggaagagggaggctggtgggagggcacactcaacggccggaccggctggttccccagcaactacgtgcgcgaggtcaaggccagcgagaagcctgtgtctcccaaatcaggaacactgaagagccctcccaaaggatttgatacgactgccataaacaaaagctattacaatgtggtgctacagaatattttagaaacagaaaatgaatattctaaagaacttcagactgtgctttcaacgtacctacggccattgcagaccagtgagaagttaagttcagcaaacatttcatatttaatgggaaatctagaagaaatatgttctttccagcaaatgctcgtacagtctttagaagaatgcaccaagttgcccgaagctcagcagagagtcggaggctgctttttaaacctgatgccacagatgaaaaccctgtacctcacgtattgtgccaatcacccttctgcagtgaatgtcctcacggaacacagtgaggagttgggggagttcatggagaccaaaggtgccagcagccctgggattctcgtgctgaccacgggcctgagcaaacccttcatgcgcctggataaataccctacgctgctcaaagagctcgagagacacatggaggattatcatacagatagacaagatattcaaaaatccatggctgccttcaaaaacctttcagcccaatgtcaagaagtccggaagaggaaagagcttgagctgcagatcctgacggaagccatccggaactgggagggcgatgacattaaaactctgggcaacgtcacttacatgtcccaggtcctgattcagtgtgccggaagtgaggaaaagaatgaaagatatcttctactcttcccaaatgttttgctaatgttgtctgccagtcctaggatgagtggctttatctatcagggaaagcttccaacgacaggaatgacaatcacaaagcttgaggacagtgaaaatcatagaaatgcatttgaaatatcagggagcatgattgagcggatattagtgtcgtgcaacaaccagcaggatctgcaggaatgggtggagcacctacagaagcaaacgaaggtcacgtctgtgggaaaccccaccataaagcctcattcagtgccatctcataccctcccctcccacccggtcactccgtccagcaagcacgcagacagcaagcccgcgccgctgacgcccgcctaccacacgctgccccacccctcccaccacggcaccccgcacaccaccatcaactggggacccctggagcctccgaaaacacccaagccctggagcctgagctgcctgcggcccgcgcctcccctccggccctcagctgctctctgctacaaggaggatcttagtaagagccctaagaccatgaaaaagctgctgcccaagcgcaaacctgaacggaagccttcagatgaggagttcgcgtcccggaaaagcacagctgctttggaagaagatgctcagattctgaaagtcattgaagcttactgcaccagcgccaaaacaaggcaaacactcaattcaacatggcaaggcactgacctgatgcataatcacgtcttggctgatgatgaccaaccaagcctagactccctggggcgtcgcagtagcctttctcgtttggagccttcagacctctcggaagactctgactatgacagtatatggacagcccatagttacagaatgggttctacatctcgtaagagctgttgctcatatatctctcaccagaactaatgcacttctgagcttttcttaacaaatgcttgttgtatcgcagcctgcttttcttagatgttttcttgctgttccttgtctcttttatgtgatattttaacaacttttgagagtgttcctgatatttcccattgtactttgtggaggcttaactgccgatgcgagtatacattcgaatgactgactattggagggaggtggtgtgttcacgtgagcctacatccgagggtgctcttcgtaaggggtagttgttgttttatagctccaaatggtttttttattctcagtgtagcaactgtttgatttctttctggatacagctgtatgaacacttttctattttatactgaaatcacacaggtttgtgatctaagtgccagaaccatggaggagactctggccttatctgtagggacctaaattttttaagtgctatgaacactgatcaagtagttgtggagagatgagaagaatatatgcagcaaaggtgctgtgagcccagttccaacggctgtgttctggtaatcgtgcagaacagcatgtgggctctgggccttggcaggtgcacagacgggcgggcgtcacgtgtgttcagagcttgtctccacctcacggctctgtgctcttctgtgtgctgcgttgtggccgtgaagtgggagctctcctttccaaaggcagagcttactgtcatggctcagatgttcactcgcatcttcaccccaaacttccctgaattgcagtgatttctgttataaggcacatagcaagcctgtaccactctacagtaaaatctctacactaacagtttaaagcccgaaagctgaagcattcagcctctgcaagtgtagactactggactgtagtagaggcatttggaatacttacaaagtcaagtgctgtggcttcagttcccccggctccccacccctgacatccatacttatgttgtctggaagagccatggacacatcattattttcagcaaccagctgcagtgaaactccatttacagcaaccccatagtataaaaccacaatgcctcattgtaatgggatattgaagttcattgaagaattactaggttgccatgtggctcacttatttaaaaaaaaaaaaaaaaaactcacccgttttcctgggatttgttgtaaggagttttcactggcctcactcagaccaatttctgcttcaaaaagcactgaatgtgacctgttgcattcagttgtagcatcaaatccacacctagtcattgcttgaggggccaaattgtgttctgtcccatgcacgctctatttggtgttaaaatggaaccttacggttgtgttttaagtattcattgaaaccagcttcagaaaacaagatgccatagtaaattgagaataacattttttccttcttcagggtggctgtaattccaggtggccgtgatttctttcttccccactgcccactccttcgccaaacccacgtattcagtgttctgatcttgtttgtgcagagtgaactctgatgcagtatcagtcttgtcctgggagccgggtcctgctgctcacaagcccagagctgccagggagctcctggcagtagcacgttgtttagaaagttgggtggcttcattcagcatggaacaagctaatggcacaggagacatcagggcagctgttaattccaaatatttgttcccaagtagctactgaactgctcacaccattggaagattttgtattttcataccaattagtaaaaataagaacattgaggagcagtcagagcccagtgttaatctccggcagagatggggtttatgtatgttcagccagatagtaaatgggatttttggagaaataagataactacaaagtttctatacttactataagtggatttagaagcgattttggttttgtattacatacggtagtcctctgcgtcagggagcacttttttgtttgcctcgagactactcattagcgcactggctaagctgcctttgccttctcgtaggcgtgggttgcctgtgtcatgggctgtgtagaccacaacactcaaacacagttgctgcacttggattttcctttaataccaagtatcatttggttatcttactgggacattttcattgatattctatacaccaaagttttgacggtttaccatcattccattttgtaccagttaaaggcattttgatgatgctttttcttgatgctaagatcactgcagaagaataacctgaccttttctttgcatttgttttgaatgtctaacaccattagcttttgtgatctggttaagaagtattagtgccacaagcctgaaaagacagttctcctgtggcagtggcgatgtggcatccagagggccattgtttctacttttgtgggacttcagtcatgctgataatagaatcttctgttcatacaattctgtaatatttatttgtacagttagtattctaatgaaaggatgaagagtctgaactagaaggtaggtttaagccatcaccaggcctttgcaaatggcctaaatggtgttccctttgaaataacgcttgccacaagtatataataagctatattaattgtgttttgcataaaattgccaaaacacagtaatgtgtatatagtggtataagatcttgaaaaaaatctctataattgtgctctttatctgtgaatgggaaaagccatttttagtaggtgactaccatttgaaaaactcaattggatgtatatctgaatgttgcattgtattgtacagtatgcatattattgtttgtggttgcatatggcaatgaagtgtttgttttatattaaaaaaaacctgttatgtacagttgaaataaattttgcatttgctagcc

SEQ ID NO: 2001 - DNA, 4575 bp, HOMO SAPIENS
cagggaggggaagacggggagccggacgcacgaccggcgagcacagaagggcacaggagctgctccgcgagataccagcgagctgaggcgcggggctggctgggaagtagtcccggccgggccctggccccgcccctgcagggcggagggacgcatcacgcaggggtggggaagccggatccgtgcgcagggttgctaagggtgaaacttttcattgactttgctcacttcgggccggggcgcgggaaggtgcgggttgttggctgaggcaagccgtggctcgggcgacgcggggccaggagggcaggaccgtctgccggcgacagcccataccgtctgccgttgcgcgacacgaaccaccctccgatccgccatccccgcgtcgtcgccgctagtccgcccgcccgccctcgggccccccgctgccgagcccgacctcctaagagctgaaagaaattattgagagtcatagtccatagccccctgcttcgtcccccaaccctcaacgacgaaaaggacttcggtcccctggcccggcgacgcccgggaaggaaaggagagcgacctccgccccgcgctcaggccaccctggagggagaagccgccccgcggccggtagagcgccccgccgccgcggagacccgaagccgcctggagcccaaggctgtacacgtgccctgtgctgattctctgcctaggaaaggaccatgcagctagagatcaaagtggccctgaacttcatcatctcctacttgtacaacaagctgccccggcgccgggcagacctgtttggggaggagctagagcggcttttgaaaaagaaatatgaaggccactggtaccctgagaagccactgaaaggctctggcttccgctgtgttcacattggggagatggtggaccccgtggtggagctggccgccaagcggagtggcctggcggtggaagatgtgcgggccaatgtgcctgaggagctgagtgtctggattgatccctttgaggtgtcctaccagattggtgagaagggagctgtgaaagtgctgtacctggatgacagtgagggttgcggtgccccagagctggacaaggagatcaagagcagcttcaaccctgacgcccaggtgttcgtgcccattggcagccaggacagctccctgtccaactccccatcgccatcctttggccagtcacccagccctaccttcattccccgctccgctcagcccatcaccttcaccaccgcctccttcgctgccaccaaatttggctccactaagatgaagaaggggggcggggcagcaagtggtgggggtgtagccagcagtggggcgggtggccagcagccaccacagcagcctcgcatggcccgctcacccaccaacagcctgctgaagcacaagagcctctctctgtctatgcattcactgaacttcatcacggccaacccggcccctcagtcccagctctcacccaatgccaaggagttcgtgtacaacggtggtggctcacccagcctcttctttgatgcggccgatggccagggcagcggcaccccaggcccgtttggaggcagtggggctggcacctgcaacagcagcagctttgacatggcccaggtatttggaggtggtgccaacagcctcttcctggagaagacaccctttgtggaaggcctcagctacaacctgaacaccatgcagtatcccagccagcagttccagcccgtggtgctggccaactgaccatctacctgcccgtggggccaggagcacccaagaccacagaaaagagaaaggaaaggccaaaaaaaagaggaaaagaaaaatgtacaaaaagattttcgatcttctcactcttacttctagaaaaaagatccagcccaggcacggaatgggagggccctgcaaagcacccaagtgtgtttcactcaccccttaccgctcgcccaccggcctgtgatttatttggttggtttgggttttatatttctttttcttttttttttttcttacatgtagttttctatataacatctttaatgagtggcttcctgtgctaagaatggtccagatgtgaactgctgctccctgctcctcccttcctccttcacactcctagtttaggattgatgtgtccaagctcatagggaagaaagagctgcagctggagcctgaccctccctggaacagggagaggctggcccgtgtcactgcctctgtcacccagctatcctcgcactcaaagccatccaacctcagcaggccttctcgggccctgccacctgaataggtctgaccccagtccccactccctttcaggctgggccacagggagttgctggctggccacttgacaccctccccctggagctgatgtctgtgactacagggagattagcacttcgtctagtgaaactcctttcatctctgtcctatggccccaccccaccattccctctaggcccagaccatcatcatggccctggccattgatgtgtatgggctttctttccctcatgcagccccttcttccccaggctggatgttgtgggtagggaggggtgtgtgtgtgtgtatttggtttgctgtccttttttaaaggattccaagccatgtgaaacttcccttctggatgtgattctgggtcgcaagtccttatttatatgtgaggctggggaatgggctgggggtattggcagtccttttgcagggcagtgtgtgtggtggggtgacaccgctgtggcttagcccaagacactcccagaggaaaacactgcagaaggaactggtttgcagactgtggaaggatctgcagttttgtttttgaccaaaaaaataataataagttagctctgaagggcagagggaatacccaagcccctgatgcctatgagaagtccctggacttcaaccctcctgttgtttggccttagcccagagggagctgctcacctgagcacccttgggggtgggcagagaggcagggtgggattttagagttagtgtctgtgcgggggcagccctgagcctggagttgagactttggggtctcttagtttggaggtgttgagtgcatttgtgcccctgcctggttgagagcttcttggtacctcttgccaccccttctcactgccctgacccaaccccactggaccttgatgctgcgaggagtggtgtcctgacggactcagcactcccgcctgatgtattggatcataggagagcacttgctctcctgcctctgccaggagagggcttgttcctccaactctaggaggccaggcaagcatggacaggagccaagggagcagggtcattaactttttcttctttgcaaagtgggcacttggcatcagggtcccaatcaccagaaagcaccaaagcccctggcaccccacccactccatcctacccagggaccccaagtaggcaactgttatggcagtgggtccagcccaggccagcactgccagcctcctctccctgcagtaggcaccagctctacctcccccggcaggcaatgtcctggcttctcagcccagcaccatctgttcccctagacttctcaggggccagcccagtctgggccaccctttgtttccctcatcctcggctcccacacaggtgacagacccagcagatagcttctctctgggaaaggttggatgctgccttacatccccttctagccctcctcccatccacacacacaggcacccacccacaccaggtcggcttgtttctcacatgtagggagagaggggagaccaacccctttgtgtcttttgaaatacgaagaaaaatgtgtgttcaggagcatgactccagtgctgcgctcttgggcccagttcagtctgtcttgtctcaaatctaggcatttttgcttcaattttattttttttaagaatacaaaaacagaaatctgcactaatttacctggtttcgtaggaaaacttttttttattttttacattttttggtgtccgtttgtattgaataatttgctacatttgtaaaatgtaagaggtatataatatatgtatatttctaacgtaaaaaacataatttttttcttttcaagattttttcttaaaaagatgagagaaacatattttttcaggaaaaacaaactttaaaaaaaaaagaggagaaataaaaccttttctcccctttccccatcctctatctatccctctttcccaggaacaaatcaaaaggtggattatcttctgaagaatggaaactgttagtccagaatgatgtgtttttctcaatgcagtgagttatagattctctagttttctccctagggatgggaagggggcattgaggcaagcctggagaggagcccggggagcagggtcatgaacttttttctttagtgaaggaggaatacaatcaagggttttgtattcagaatgttgtgcaatattttggaatgggacattggtgtgtttagagattttagtttaaaaacaaaacaaaaagattgatcaaatctgtacagtttctattgttccagatttttttaagtttgtattaaaagcatgatacataatagccttcaaaaaaaaaa

SEQ ID NO: 2002 - DNA, 2722 bp, HOMO SAPIENS
ttggcgcgtaaaagtggccgggactttgcaggcagcggcggccgggggcggagcgggatcgagccctcgccgaggcctgccgccatgggcccgcgccgccgccgccgcctgtcacccgggccgcgcgggccgtgagcgtcatggccttggccggggcccctgcgggcggcccatgcgcgccggcgctggaggccctgctcggggccggcgcgctgcggctgctcgactcctcgcagatcgtcatcatctccgccgcgcaggacgccagcgccccgccggctcccaccggccccgcggcgcccgccgccggcccctgcgaccctgacctgctgctcttcgccacaccgcaggcgccccggcccacacccagtgcgccgcggcccgcgctcggccgcccgccggtgaagcggaggctggacctggaaactgaccatcagtacctggccgagagcagtgggccagctcggggcagaggccgccatccaggaaaaggtgtgaaatccccgggggagaagtcacgctatgagacctcactgaatctgaccaccaagcgcttcctggagctgctgagccactcggctgacggtgtcgtcgacctgaactgggctgccgaggtgctgaaggtgcagaagcggcgcatctatgacatcaccaacgtccttgagggcatccagctcattgccaagaagtccaagaaccacatccagtggctgggcagccacaccacagtgggcgtcggcggacggcttgaggggttgacccaggacctccgacagctgcaggagagcgagcagcagctggaccacctgatgaatatctgtactacgcagctgcgcctgctctccgaggacactgacagccagcgcctggcctacgtgacgtgtcaggaccttcgtagcattgcagaccctgcagagcagatggttatggtgatcaaagcccctcctgagacccagctccaagccgtggactcttcggagaactttcagatctcccttaagagcaaacaaggcccgatcgatgttttcctgtgccctgaggagaccgtaggtgggatcagccctgggaagaccccatcccaggaggtcacttctgaggaggagaacagggccactgactctgccaccatagtgtcaccaccaccatcatctcccccctcatccctcaccacagatcccagccagtctctactcagcctggagcaagaaccgctgttgtcccggatgggcagcctgcgggctcccgtggacgaggaccgcctgtccccgctggtggcggccgactcgctcctggagcatgtgcgggaggacttctccggcctcctccctgaggagttcatcagcctttccccaccccacgaggccctcgactaccacttcggcctcgaggagggcgagggcatcagagacctcttcgactgtgactttggggacctcacccccctggatttctgacagggcttggagggaccagggtttccagagatgctcaccttgtctctgcagccctggagccccctgtccctggccgtcctcccagcctgtttggaaacatttaatttatacccctctcctctgtctccagaagcttctagctctggggtctggctaccgctaggaggctgagcaagccaggaagggaaggagtctgtgtggtgtgtatgtgcatgcagcctacacccacacgtgtgtaccgggggtgaatgtgtgtgagcatgtgtgtgtgcatgtaccggggaatgaaggtgaacatacacctctgtgtgtgcactgcagacacgccccagtgtgtccacatgtgtgtgcatgagtccatgtgtgcgcgtgggggggctctaactgcactttcggcccttttgctctgggggtcccacaaggcccagggcagtgcctgctcccagaatctggtgctctgaccaggccaggtggggaggctttggctggctgggcgtgtaggacggtgagagcacttctgtcttaaaggttttttctgattgaagctttaatggagcgttatttatttatcgaggcctctttggtgagcctggggaatcagcaaaggggaggaggggtgtggggttgataccccaactccctctacccttgagcaagggcaggggtccctgagctgttcttctgccccatactgaaggaactgaggcctgggtgatttatttattgggaaagtgagggagggagacagactgactgacagccatgggtggtcagatggtggggtgggccctctccagggggccagttcagggccccagctgccccccaggatggatatgagatgggagaggtgagtgggggaccttcactgatgtgggcaggaggggtggtgaaggcctcccccagcccagaccctgtggtccctcctgcagtgtctgaagcgcctgcctccccactgctctgccccaccctccaatctgcactttgatttgcttcctaacagctctgttccctcctgctttggttttaataaatattttgatgacgtttgggccgggttttgggactctgttgggaacatttcggggcgggagaggccaaggttgctggggaaatgcccattctccacttcccttctccctgtccgtgcccgatttgatttgagcctcataactcgaagaaaggtcagcttcctcgctgttttggtcctaactcaaaagcagatccagtaaaggtttttgttgtaaaaaaaaaaaaaaaaaaaaaaa

SEQ ID NO: 2003 - DNA, 1317 bp, Homo sapiens
cccctcctccctccttgcagagccggcgccggaggagacgcacgcagctgactttgtcttctccgcacgactgttacagaggtctccagagccttctctctcctgtgcaaaatggcaactcttaaggaaaaactcattgcaccagttgcggaagaagaggcaacagttccaaacaataagatcactgtagtgggtgttggacaagttggtatggcgtgtgctatcagcattctgggaaagtctctggctgatgaacttgctcttgtggatgttttggaagataagcttaaaggagaaatgatggatctgcagcatgggagcttatttcttcagacacctaaaattgtggcagataaagattattctgtgaccgccaattctaagattgtagtggtaactgcaggagtccgtcagcaagaaggggagagtcggctcaatctggtgcagagaaatgttaatgtcttcaaattcattattcctcagatcgtcaagtacagtcctgattgcatcataattgtggtttccaacccagtggacattcttacgtatgttacctggaaactaagtggattacccaaacaccgcgtgattggaagtggatgtaatctggattctgctagatttcgctaccttatggctgaaaaacttggcattcatcccagcagctgccatggatggattttgggggaacatggcgactcaagtgtggctgtgtggagtggtgtgaatgtggcaggtgtttctctccaggaattgaatccagaaatgggaactgacaatgatagtgaaaattggaaggaagtgcataagatggtggttgaaagtgcctatgaagtcatcaagctaaaaggatataccaactgggctattggattaagtgtggctgatcttattgaatccatgttgaaaaatctatccaggattcatcccgtgtcaacaatggtaaaggggatgtatggcattgagaatgaagtcttcctgagccttccatgtatcctcaatgcccggggattaaccagcgttatcaaccagaagctaaaggatgatgaggttgctcagctcaagaaaagtgcagataccctgtgggacatccagaaggacctaaaagacctgtgactagtgagctctaggctgtagaaatttaaaaactacaatgtgattaactcgagcctttagttttcatccatgtacatggatcacagtttgctttgatcttcttcaatatgtgaatttgggctcacagaatcaaagcctatgcttggtttaatgcttgcaatctgagctcttgaacaaataaaattaactattgtagtgtgc

SEQ ID NO: 2004 - DNA, 4843 bp, Homo sapiens
gaggtggggaagccatcggacgtcggcggtgaggatcttctcctgacccagcatcgctcatcacaatgaagaaccaagacaaaaagaacggggctgccaaacaatccaatccaaaaagcagcccaggacaaccggaagcaggacccgagggagcccaggagcggcccagccaggcggctcctgcagtagaagcagaaggtcccggcagcagccaggctcctcggaagccggagggggctcaagccagaacggctcagtctggggcccttcgtgatgtctctgaggagctgagccgccaactggaagacatactgagcacatactgtgtggacaataaccaggggggccccggcgaggatggggcacagggtgagccggctgaacccgaagatgcagagaagtcccggacctatgtggcaaggaatggggagcctgaaccaactccagtagtcaatggagagaaggaaccctccaagggggatccaaacacagaagagatccggcagagtgacgaggtcggagaccgagaccatcgaaggccacaggagaagaaaaaagccaagggtttggggaaggagatcacgttgctgatgcagacattgaatactctgagtaccccagaggagaagctggctgctctgtgcaagaagtatgctgaactgctggaggagcaccggaattcacagaagcagatgaagctcctacagaaaaagcagagccagctggtgcaagagaaggaccacctgcgcggtgagcacagcaaggccgtcctggcccgcagcaagcttgagagcctatgccgtgagctgcagcggcacaaccgctccctcaaggaagaaggtgtgcagcgggcccgggaggaggaggagaagcgcaaggaggtgacctcgcacttccaggtgacactgaatgacattcagctgcagatggaacagcacaatgagcgcaactccaagctgcgccaagagaacatggagctggctgagaggctcaagaagctgattgagcagtatgagctgcgcgaggagcatatcgacaaagtcttcaaacacaaggacctacaacagcagctggtggatgccaagctccagcaggcccaggagatgctaaaggaggcagaagagcggcaccagcgggagaaggattttctcctgaaagaggcagtagagtcccagaggatgtgtgagctgatgaagcagcaagagacccacctgaagcaacagcttgccctatacacagagaagtttgaggagttccagaacacactttccaaaagcagcgaggtattcaccacattcaagcaggagatggaaaagatgactaagaagatcaagaagctggagaaagaaaccaccatgtaccggtcccggtgggagagcagcaacaaggccctgcttgagatggctgaggagaaaacagtccgggataaagaactggagggcctgcaggtaaaaatccaacggctggagaagctgtgccgggcactgcagacagagcgcaatgacctgaacaagagggtacaggacctgagtgctggtggccagggctccctcactgacagtggccctgagaggaggccagaggggcctggggctcaagcacccagctcccccagggtcacagaagcgccttgctacccaggagcaccgagcacagaagcatcaggccagactgggcctcaagagcccacctccgccagggcctagagagcctggtgttgggtcatgctgggaagggagcggcagcccagccaggcctggcccataaaaggctcccatgctgagcagcccattgctgaagccaggatgttctgacctggctggcatctggcacttgcaattttggattttgtgggtcagttttacgtacatagggcattttgcaaggccttgcaaatgcatttatacctgtaagtgtacagtgggcttgcattggggatgggggtgtgtacagatgaagtcagtggcttgtctgtgagctgaagagtcttgagaggggctgtcatctgtagctgccatcacagtgagttggcagaagtgacttgagcatttctctgtctgatttgaggctcagacccctccctgcccttcagagctcaagacaagtaatacacccaggtcttgactgcatttgtcttgtgagcagggcttgcttggtcagctcaggccctcctagctgctctggaggctcctttgattctctagacctggaaaaggtgtccctaggcagagccctggcagggcgctcagagctggggatttcctgcctggaacaagggacctggagaatgtttttgcgtgggatgatgtgctggtcaggagccccttgggcatcgcttcccctgccctttggtagtgccaggaccaggccaatgatgcttctcagtagccttatcattcacaggtgcctctctagcctgcacaaatgattgacaagagatcacccaaaggattatttctgaaggtgtttttttctttatttctttttctttttttttttttttctttttcttttttttttgcacatgacagtgtttgtattgaggaccttccaaggaagagggatgctgtagcagtggtgcctgggtgcctggcctccagtgtcccacctccttcaccaccccacttggctcctttgccatcttgatgctgaggtttcctgtttggtgagatcaggttgtttgtggtaaaagaaaggaaagggcttctgatggctttgccacaagcttacctgtgggtttcagtcctgagaggccaccaccagttcccatcagcactgtctccatgcagcagttgctgggtcccatgtccagctgcctctttggcttcatgggtttttctgcttcctgcccccacccccacatgtgcaatcctcaagatttgtcctgattctatttcctggcacctccctgcctgtccttggggattctacttcttcctgtgtgggagcccatagctgttgtctaacaggtaagaaatgaaattgaactattgactgggccccagaaatccataaaatggctgcagacagttgtttctgtgtcctgttctacccccactccagtacataactactatgtactgtgtagagccattctatatgctgaatgttctgctgttgcaaacttgccagggtattagccagtgtttgtgccaagcagttttctgggacaacagaatgactcagaccaagatggataggatggttagggctttgcttcttgctgtttttctttgaagctagttcattgtcctgcaggtcccttcatcttccatacctagcccactcttttagcccttaccttaaatctctcagataagttggttcacaaagaatgttaagtactgaatcatgtgtgactgagaccagagatggcaaatgaatggcacaccatttctccttctcctgccccagggcaggtaccactgatctgcatcagagttgcctgctattctctggtgtatccttcacatctaggtgccctcaagcagctgtgtgagtgttgagatctctgccatctctggctgagatactgctgtcctgtgaagtgtttcccatgacctttttcttcccctttgaatccctctgtctggagtagtccttgcctcttcctgctccagtagggccttttccctaccccagcccctgtgccaggctaagctggtacaagagctgccaacctcacagagtgtttgctaggcgagagaggtgcagggaagaggcagaggtatgcaccttcccccttgaagagaggggaaaggcctacagtggcccacataattgcctgactcacacttcagctacctcttaatgcctgtggagggactggagctgctggatcccagtgtggtggtgtaggaggccacagtgagcaggtggccccagctgggtttcccaggtcaggaatgtgggccccaggcaaggtgcagcctttgctcacagctccatccatgtctagaccttcaggccagtctgcagatgaggttccctacctttttcttctcttcattgaccaaatcaaccaatcactacagctgctctgcttctgctttccaaagtagcccaggtcctgggccagatgcaggggaggtgcctatccatgagtgaaggccagtgtcttcctcacctgggtgggtcccacacttgtgacctcagttttaggaccaagatctgtgttggtttcttagattgctagcttttcctccaggggaccacagcaggtgaagctcaagagcgcatggctctgctaatagtaaattgttttcagggccttgtccagctgagagcttcatgtccaccagattctgagaggtgtcagcagcactttttttttttatttgttgtttgttttccatgaggttatcggaccatgggctgagctcaggcactttctgtaggagactgttatttctgtaaagatggttatttaaccctcctccaccccatcacggtggccctgagggctgacccggaggccagtggagctgcctggtgtccacgggggagggccaaggcctgctgagctgattctccagctgctgccccagcctttccgccttgcacagcacagaggtggtcaccccagggacagccaggcacctgctcctcttgcccttcctgggggaagggagctgccttctgtccctgtaactgctttccttatggcccagcccggccactcagacttgtttgaagctgcactggcagcttttttgtctcctttgggtattcacaacagccagggacttgattttgatgtattttaaaccacattaaataaagagtctgttgccttaaaaaaaaaaaaaaaaaaaaaaaaaaaaaaaaaaaaaaaaaaaaaaaa

SEQ ID NO: 2005 - DNA, 1497 bp, Homo sapiens; identical to SEQ ID NO: 331

SEQ ID NO: 2006 - DNA, 8438 bp, Homo sapiens
gtgtagaaaatggcgctggtgcagcggctcgggcctctccccgcggcgctgcggagggcttgaggctcgcgagcctccttcgccgcgccccacttgctcgtgcactttacacacatgagagaattggaagctaaagctaccaaagacgtagaaagaaatcttagcagggatttagtgcaagaagaagaacagttgatggaagaaaagaaaaagaaaaaagacgacaagaaaaagaaggaagctgctcaaaagaaggccactgaacaaaaaatcaaagtgccagaacagataaagcccagtgtaagccagcctcagcctgccaactctaataacggcacttccacagcaaccagcactaataataatgccaagcgagctacagccaacaatcagcagccacagcagcagcagcaacagcagcagccgcagcagcagcagccacagcagcagccacagccgcagccgcagcagcagcagccacagcagcagccacaggccttgcctcggtatcctcgtgaagtacctccacgatttcgccaccaggaacacaaacagcttctaaagaggggtcagcattttcctgttatagcagcaaaccttggatctgctgttaaggtgttaaacagccagtcagaaagcagtgctttaacaaatcaacagccacaaaataacggagaggtgcagaacagcaaaaaccagtcagatataaaccacagtacttcaggatcccattatgaaaattcccagcggggacctgtgtcttctacaagtgattctagcacaaactgtaagaatgctgttgtaagtgacttgtcggaaaaagaagcatggccctcagcccctggcagtgatccggagttggcttcagaatgtatggatgctgattctgcctccagttctgaatcagagagaaacatcactatcatggcttcagggaacacaggtggtgaaaaagatggccttcggaatagcactggacttggttcccaaaacaagtttgtagttggtagcagcagcaataatgtgggccatggaagtagtactgggccatggggtttttcccatggagccataataagcacatgtcaggtctctgtggatgctcctgaaagcaaatctgaaagtagcaacaatagaatgaatgcttggggcactgtaagttcttcatcaaatggagggttaaatccaagcactttgaattcagctagcaaccatggtgcctggccagtattagagaacaatggacttgccctaaaagggcctgtagggagtggtagttctggcattaatattcagtgcagtactataggccagatgcctaacaatcagagtattaactctaaagtgagtggtggttctacccatggtacctggggaagccttcaggaaacttgtgaatctgaagtaagtggtacacagaaggtttcattcagtggtcaacctcaaaatattaccactgaaatgactggaccaaataacactactaactttatgacctctagtttaccaaactccggttcagtgcagaataatgagctgcctagtagtaacacaggggcctggcgtgtgagcacaatgaatcatcctcagatgcaggctccatcaggtatgaatggcacttccctttctcaccttagcaatggagagtcaaaaagtggaggctcttatggtactacatggggtgcctatggttctaattactctggagacaaatgttcaggccctaatggccaagctaatggtgacactgtgaatgcaactctaatgcagcctggcgtaaatggtcctatgggcactaactttcaagttaacacaaacaaaggaggtggtgtgtgggaatctggtgcagcaaactcccagagtacatcatggggaagtggaaatggcgcaaattctggaggaagtcgaagaggatggggaacccctgcacaaaacactggcactaatttacccagcgttgagtggaacaaactgcctagcaatcagcattccaatgatagtgcaaatggcaatggtaagacgtttacaaatggatggaaatctactgaggaagaggatcagggttctgccacatctcagacaaatgagcaaagcagtgtgtgggccaaaacaggaggtacagtggagagcgatggtagtacagaaagcactggacgccttgaggaaaaaggaactggggaaagtcagagtagagacagaagaaaaattgatcagcacacattactccaaagcattgtaaacagaactgacttagatccacgtgtcctgtccaactctggttggggacagactcctattaagcagaatactgcctgggatacagaaacatcacctagaggggaacgaaagactgacaatgggacagaggcctggggaagctctgcaacacagacttttaactcaggggcatgtatagataagactagccctaatggtaatgatacctcatctgtatcagggtggggcgatcccaaacctgctctgaggtggggagattccaaaggctcaaactgccagggggggtgggaagatgattctgctgctacaggaatggtcaagagcaatcagtgggggaattgcaaagaggagaaggctgcatggaatgactcgcaaaagaataaacagggatggggtgatggacaaaaatcaagccaagggtggtctgtttctgccagtgataactggggagaaacttcaaggaataaccattggggtgaggccaataagaaatccagctcaggaggtagtgacagtgacaggtccgtttccggttggaacgaacttggtaaaactagttctttcacttggggaaacaacataaatccaaataattcatcaggatgggatgaatcttctaaacctactccttcccagggatggggagaccctccaaagtctaatcagtctctaggttggggagattcgtcaaagccagtcagctctccagactggaacaagcaacaagacattgttggatcttggggaatcccaccagctacaggcaaacctcctggtacaggctggctggggggacctataccagccccagcaaaagaagaagaacccacaggctgggaggaaccatccccagaatctatacgtcgcaaaatggagattgatgatggaacttcagcttggggagatccaagcaaatacaactacaaaaatgtgaacatgtggaacaaaaacgtcccaaatggcaacagccgttcagaccagcaagcacaggtacatcagctgctaacgcctgcaagtgccatctcaaacaaagaggcaagcagtggctctggctggggtgagccctggggggagccttctactccagccacaactgtggataatggtacttcagcatggggtaagcccatagacagtggtcccagctggggggaacccattgctgcggcatccagcacatccacgtggggctccagctctgttggtccacaagcattaagcaaatctgggccaaaatctatgcaagatggctggtgtggtgatgatatgccattgcctggaaatcgccccactggctgggaagaggaagaggatgtggagattggaatgtggaatagtaattcatctcaagagcttaactcatctttaaattggccaccatatacaaagaaaatgtcatcgaagggtctgagtggcaaaaaaaggagaagggaaaggggaatgatgaaaggtggaaacaaacaagaagaagcgtggataaatccatttgttaaacagttttcaaacatcagtttttcgagagactcaccagaggaaaatgtacaaagcaataagatggacctttctggaggaatgttacaagacaaacgaatggagatagataaacatagcctaaatattggtgattacaatcgaacggtcgggaaaggccctggttctcggcctcagatttccaaagagtcttccatggagcgcaatccttattttgataaggatggcattgtagcagatgaatcccaaaacatgcagtttatgtccagtcaaagcatgaagcttcccccttcaaatagtgcactacctaaccaggcccttggctccatagcagggctgggtatgcaaaacttgaattctgttagacagaatggcaatcccagtatgtttggtgttggaaacacagcagcacaaccccggggcatgcagcagcctccagcacaacctcttagttcatctcagcctaatctccgtgctcaagtgcctcctccattactctcccctcaggttccagtttcattgctgaagtatgcaccaaacaacggtggcctgaatccactctttggccctcaacaggtagccatgctgaaccagctatcccagctaaaccagctttctcagatctcccagttacagcgattgttagcgcagcagcaaagggcgcagagtcagagaagcgtgccttctgggaaccggccgcagcaagaccagcagggtcgacctcttagtgtgcagcagcaaatgatgcaacaatctcgtcaacttgatccaaacctgttggtgaagcagcagactccaccatctcagcagcagccactccatcagccagccatgaagtctttccttgacaatgtcatgccccacactacacctgagctgcaaaaagggccatcaccaataaatgctttcagcaacttccctataggcttgaactcaaacttgaatgtaaatatggatatgaacagtattaaagagccacagtcaagactaaggaagtggacgacagtggacagcatttctgtgaacacatctttggatcaaaactccagcaaacatggtgctatttcaagtggtttcaggctggaagagtctccatttgttccctatgactttatgaacagcagtacttcaccagccagtcctccaggttcaataggagatggctggccacgtgccaaatcgcctaacggctctagcagtgttaattggccaccagaatttcgtcctggtgagccatggaaaggttatccaaacattgaccctgaaactgacccttacgtcactcctggcagtgtcataaacaatctttcaattaatactgtgcgggaagttgaccacctcagggacaggaacagtgggtcatcctcatccttgaacaccacgctgccttcaactagtgcctggtcatccattcgtgcctccaactacaacgttcccctcagcagtacagcacaaagcacttcagccagaaatagtgattccaaattgacatggtctcctggttcagttacaaacacctctctggctcatgagctgtggaaggtccctttgccacctaaaaacatcactgctccgtcccgcccacctccgggactgactggtcagaagccacccttgtctacgtgggataattctccccttcgtataggtggaggatggggaaattctgacgccagatataccccaggttccagctggggtgagagcagctcagggagaataacaaattggcttgttctaaaaaaccttacacctcagatcgatggctcaactctgcgcactctgtgcatgcagcacggcccgctgatcacattccacctgaacctccctcacggaaatgctctggtccgctacagttcaaaagaagaggtagtgaaggcacaaaagtctctgcacatgtgtgtactggggaacactactattcttgctgagtttgccagtgaagaggagatcagtcgtttctttgcacaaagccagtctctgaccccttctcccggctggcagtctctcgggtccagccagagccggctgggctccctcgactgttcccactcattctccagccggaccgatctcaatcactggaatggtgctgggctgtcgggaactaactgtggagaccttcacggcacttcactctgggggaccccgcattattccacaagcctgtggggtcccccaagcagcagcgacccccgaggaattagcagcccatctcccattaacgcttttctttctgttgaccacctgggtgggggtggagagtccatgtaacagtgtagatgcagactcaccgaccgggacctcagacgcgagggaaaggagcactaagtggggctcgccgcctgcagccaggggccgcctgtgggaacagctattctctgcacattttccactttgttttccccaaaacatatcagtttgaatacttgaatcatgcaggccaatattataatgtgaaaaggtatctactctatttacactcccaaatagcgccatacatgctaaaccgtagagaatgagctcgcttgtgtctattcatcatgtttagcctttggattctttttttttttttccttctattcctccccaacccccccccccgcccctttttttctctcttgcaaaaccattttttgggctgataacgtatgagcttttccctttgcactgaatgatgttctctccgtctcatcggcagtatggggggcagctgtcccagtgtcaatgtttactcaagggtgttcttaggaggcgtgcgctctctactatgccttgatgttgcctaccttattgtggtatcgtggagtttaaaagatcaagttaggatgctgacttaggattattaatgaaagtgttgcaccagttttttcatgttgtaaaactaaagaatttcgctctgcagtttgaaaaactgtggccacagctgtgacttgcagcccacctgccacccaggacgggccctgcactttgaataggctttccattttgttttggaggttctcactttgaaccttcttgtttacagatttttttgtttgttttttgagaaaaaaaaatgtttactcttccatcatttaaaaaaaatgtaaaagacaaaaaaaaaatggaggatgatttaaaagatgctttctatctctgggaaaaaggagcagcatttggccatgttcttttgtttttctattcctgtcccaaatcaaagagcatggttctcaggaaaaccagttccccagtttaaaaaaaaaaaaaaaaattccttgtagtttcttagaggaaaaaaagaaaaaccccaacttttagcactgatactacatattgctctgttaaagaattttctctgccaaaaaaaaagaaaaaacaaaaaaacgcttaaagctggagtttgacattctgctttcagatgctgtctttttattagtgagtgatgatggtttgctaataatcaataggtaataattttttgtaatcccatcaagtggctccatatgtttctgctctctcgtgactgtgttaatgtttaactgttgtaccttaaagccgaaatcagtaactatgcatactgtaaccaaggtattgggcttacagagttgtttgttgtataaagaaaattttaaatgttgttgcaaactaacgagttacaccattttaaactttctttcctcccccctttttttgcccacaaatggtattataatgcttgcttagtcaaagaagagagactaaacaagggtaaaaattttaacagtacagaatttgccatcatatcattgccttgattctaactgtttgtgtcctaagatgcaaaagaagtcagtggcttttaactgtttacaaatagaatgtgattgtaaaatgtacagtttggttgtgtttgaattatgaaatttcttcagatataataaaccatgactttttggctgctcaacattaattgtctcctttttgtgaatttatttgtaggctcttttttataatgaaagtttcaaagttgctatgtatgagggttctcatagagcaaccgattaaaaatctaagcaaatatttgaacattttatctgaactcatcacaatttcaccctgaaataatgtgagaacaatgggaaactgtagcttgctccttcccaccctctctgagcatctttgggatcttgttgctcaaaactcttctgtgacttcatcttccccaccatttgtgcccatctcaagcctcagcaagaaaccatgtggaacatgaagcttaatgacttgacagtgtactagtgttaaactctcatacctctgttacaaagcgagaaacgccacacccggactggccttttcttcccccttcacggccctcgcttctccctgcaggagctcgggggcgaaacctgtgtatggatttcagtgtatgacttcagatcatgctccaacttgccaggtgtgagctaatgttgtcggacaccttactataagcaaatgttattcagtgcgttcaatgtatattgacttccatactggtttttccaaaaaccaaaggtagctttgaaaaaccatgtctggaaatgtttggagcgttaagctgattgaccttctgaccttggggctttgagtagtatataattcataactgcgttaattgtattgttaaagtgtttgggagttttttgcgcttgttatgtggaaataaagtgtttgatttaaaattttttaaaaaaaaaaaaaaaaaa

SEQ ID NO: 2007 - DNA, 1825 bp, Homo sapiens; identical to SEQ ID NO: 253

SEQ ID NO: 2008 - DNA, 3209 bp, Homo sapiens; identical to SEQ ID NO: 1415

SEQ ID NO: 2009 - DNA, 4377 bp, Homo sapiens
agttgtgacggaacgcatgccattataatgagtttttatatctggtgggagcttttacagggtataaaataatgtgaatttagtgtatgtggagattttcctgttatctaagttcccagtttctctttcaatggcaagaaaacgggtttttgataaggcgcgcgccgcgggcagcttctgcctcagcgggtcttcggcggccgcgggaagacccgagagtcattagaagcgcaagatggcgactgcggccgaaacctcggcttcagaacccgaggctgagtccaaggctgggcccaaggctgacggagaggaggatgaggttaaggcggctaggacaaggaggaaggtgttatcgcgggctgtggccgctgcgacatacaagaccatggggccagcgtgggatcagcaggaggaaggcgtgagcgagagcgatggggatgagtacgccatggcttcctccgcggagagctcccccggggagtacgagtgggaatatgacgaagaggaggagaaaaaccagctggagattgagagactggaggagcagttgtctatcaacgtctatgactacaactgccatgtggacttgatcagactgctcaggctggaaggggagcttaccaaggtgaggatggcccgccagaagatgagtgaaatctttcccttgactgaagagctctggctggagtggctgcatgacgagatcagcatggcccaggatggcctggacagagagcacgtgtatgacctctttgagaaagccgtgaaggattacatttgtcctaacatttggctagagtatggccagtactcagttggtgggattggtcagaaaggtggccttgagaaagttcgctccgtgtttgaaagggctctctcgtctgttggtttacatatgaccaaaggactcgccctctgggaggcttaccgagagtttgaaagtgcgattgtggaagctgctcggcttgagaaagtccacagtcttttccggcgacagttggcgatcccactctatgatatggaggccacatttgcagagtatgaagaatggtcagaagacccaataccagagtcagtaattcagaactataacaaagcactacagcagctggagaaatataaaccctatgaagaagcactgttgcaggcagaggcaccaaggctggcagaatatcaagcatatatcgattttgagatgaaaattggcgatcctgctcgcattcagttgatctttgagcgcgccctggtcgagaactgccttgtcccagacttatggatccgttacagtcagtacctagatcgacaactgaaagtaaaggatttggttttatctgtacataaccgcgctattagaaactgcccctggacagttgccttatggagtcggtacctcttggccatggagagacatggagttgatcatcaagtaatttctgtaaccttcgagaaagctttgaatgccggcttcatccaggccactgattatgtggagatttggcaggcataccttgattacctgaggagaagggttgatttcaaacaagactccagtaaagagctggaggagttgagggccgcctttactcgtgccttggagtatctgaagcaggaggtggaagagcgtttcaatgagagtggtgatccaagctgcgtgattatgcagaactgggctaggattgaggctcgactgtgcaataacatgcagaaagctcgggaactctgggatagcatcatgaccagaggaaatgccaagtacgccaacatgtggctagagtattacaacctggaaagagctcatggtgacacccagcactgccggaaggctctgcaccgggccgtccagtgcaccagtgactacccagagcacgtctgcgaagtgttactcaccatggagaggacagaaggttctttagaagattgggatatagctgttcagaaaactgaaacccgattagctcgtgtcaatgagcagagaatgaaggctgcagagaaggaagcagcccttgtgcagcaagaagaagaaaaggctgaacaacggaaaagagctcgggctgagaagaaagcgttaaaaaagaagaaaaagatcagaggcccagagaagcgcggagcagatgaggatgatgagaaagagtggggcgatgatgaagaagagcagccttccaaacgcagaagggtcgagaacagcatccctgcagctggagaaacacaaaatgtagaagtagcagcagggcccgctgggaaatgtgctgccgtagatgtggagcccccttcgaagcagaaggagaaggcagcctccctgaagagggacatgcccaaggtgctgcacgacagcagcaaggacagcatcaccgtctttgtcagcaacctgccctacagcatgcaggagccggacacgaagctcaggccactcttcgaggcctgtggggaggtggtccagatccgacccatcttcagcaaccgtggggatttccgaggttactgctacgtggagtttaaagaagagaaatcagcccttcaggcactggagatggaccggaaaagtgtagaagggaggccaatgtttgtttccccctgtgtggataagagcaaaaaccccgattttaaggtgttcaggtacagcacttccctagagaaacacaagctgttcatctcaggcctgcctttctcctgtactaaagaggaactagaagaaatctgtaaggctcatggcaccgtgaaggacctcaggctggtcaccaaccgggctggcaaaccaaagggcctggcctacgtggagtatgaaaatgaatcccaggcgtcgcaggctgtgatgaagatggacggcatgactatcaaagagaacatcatcaaagtggcaatcagcaaccctcctcagaggaaagttccagagaagccggagaccaggaaggcaccaggtggccccatgcttttgccgcagacatacggagcgagggggaagggaaggacgcagctgtctctactgcctcgtgccctgcagcgcccaagtgctgcagctcctcaggctgagaacggccctgccgcggctcctgcagttgccgccccagcagccaccgaggcacccaagatgtccaatgccgattttgccaagctgtttctgagaaagtgaacgggacgctgggagacaggaaatgccttacttcactctggcccggcggacctcccaccacccagcagtgcactggggatggacaggcctggtgtgctgcgtgctcgcaaccacagatggctcctcggctttagacagaaaggggaaggggttctaagtcaagagcctttcagtgctccctcatattgagggcagtggcagaaaagtgaccactctgcaggctgggcccaggatgtggtgtcctgagatagttttgtatcttaaagactgaggcacagaagcgaaacgagaacacactgtttttgagacacagttgtccaaatgtttctggccagctccggcccctttttgtatgacacttctcttccaccctgcacagcacatgtgcccgtcattcttttaattttaaaagatgaaatggcagatgctagtaattcacagaatggcctcttgtgggggtgggtctgagggaagtcagctataaaacatttgctggagttttgttcaatggggctgtgcatttttatattatgtgtttgtaaatgacatgtcagccattgtttcatgtttcctaaaagcagaatatttgcaacatttgttttgtataggaattatttgtgccacctgctgtggactgttttctttgcctagtgactagtgacctgtgttgtctaaacatgagtttcagccctttggttttgtttaataccatgtcaaatgcaaacttcaattctccccatttagctttattaaactgacgttctcttcaaaacttcttgctgaatggtactcagatgtgcattcacatacagatgtgttttgaagtgggtgtaccttgctttacctaatagatgtgtaaatagaacttttgtaagtcaaatcccattgtcactttgatttaaattattccagctgtgatgtgtcttcattttatagcagtttgacactggagcttttgagcttttttacctcacatcttttatcaaataatatttactgctttgaaaacagcaacagcattggccagttcagtaggggaagcttgctttattaagacactctggagaaagacgtcagggaatccttgtatatgtcgtgggaatcaactcctcatttatctgttgcgtaagtttaagtttttgtgcatcagtcgggttttctatatttttttaacttaacattttttaatataaccgattaaaaagtagacagaacagtaaaataaactcctgtgtgcctaccaaaaaaaa

SEQ ID NO: 2010 - DNA, 1665 bp, Homo sapiens
ccggaggagtcacgtagctctgcgacatccgcagcctcatttaccagagggagccagggctgcagcctcatctgtttgcggatcagaacccgagctgtgcttgtggctgcggctgctaactggctgcgcacagggagctgtcaccatgcctcactcgtacccagccctttctgctgagcagaagaaggagttgtctgacattgccctgcggattgtagccccgggcaaaggcattctggctgcggatgagtctgtaggcagcatggccaagcggctgagccaaattggggtggaaaacacagaggagaaccgccggctgtaccgccaggtcctgttcagtgctgatgaccgtgtgaaaaagtgcattggaggcgtcattttcttccatgagaccctctaccagaaagatgataatggtgttcccttcgtccgaaccatccaggataagggcatcgtcgtgggcatcaaggttgacaagggtgtggtgcctctagctgggactgatggagaaaccaccactcaagggctggatgggctctcagaacgctgtgcccaatacaagaaggatggtgctgactttgccaagtggcgctgtgtgctgaaaatcagtgagcgtacaccctctgcacttgccattctggagaacgccaacgtgctggcccgttatgccagtatctgccagcagaatggcattgtgcctattgtggaacctgaaatattgcctgatggagaccacgacctcaaacgttgtcagtatgttacagagaaggtcttggctgctgtgtacaaggccctgagtgaccatcatgtatacctggaggggaccctgctcaagcccaacatggtgaccccgggccatgcctgtcccatcaagtataccccagaggagattgccatggcaactgtcactgccctgcgtcgcactgtgcccccagctgtcccaggagtgaccttcctgtctgggggtcagagcgaagaagaggcatcattcaacctcaatgccatcaaccgctgcccccttccccgaccctgggcgcttaccttctcctatgggcgtgccctgcaagcctctgcactcaatgcctggcgagggcaacgggacaatgctggggctgccactgaggagttcatcaagcgggctgaggtgaatgggcttgcagcccagggcaagtatgaaggcagtggagaagatggtggagcagcagcacagtcactctacattgccaaccatgcctactgagtatccactccataccacagcccttggcccagccatctgcacccacttttgcttgtagtcatggccagggccaaatagctatgcagagcagagatgccttcacctggcaccaacttgtcttcctttctctcttcccttcccctctctcattgctgcacctgggaccataggatgggaggatagggagcccctcatgactgagggcagaagaaattgctagaagtcagaacaggatggctgggtctccccctacctcttccagctcccacaattttcccatgatgaggtagcttctccctgggctctccttcttgcctgccctgtctcctgggatcagagggtagtacagaagccctgactcatgccttgagtacataccatacagcaaataaatggtagcaaaacattctaaaaaaaaaaaaaaa

SEQ ID NO: 2011 - DNA, 1955 bp, Homo sapiens
acgcaaagcagtgtgggttgattctgaggtgcactgtgggaaagagcttgtcgctgcggtgttgctgttggagactcgattgttggtgacagcgaaagaacgataacaaaatgccggagcgagatagtgagccgttctccaaccctttggcccccgatggccacgatgtggatgatcctcactccttccaccaatcaaaactcaccaatgaagacttcaggaaacttctcatgacccccagggctgcacctacctctgcaccaccttctaagtcacgtcaccatgagatgccaagggagtacaatgaggatgaagacccagctgcacgaaggaggaaaaagaaaagttattatgccaagctacgccaacaagaaattgagagagagagagagctagcagagaagtaccgggatcgtgccaaggaacggagagatggagtgaacaaagattatgaagaaaccgagcttatcagcaccacagctaactatagggctgttggccccactgctgaggcggacaaatcagctgcagagaagagaagacagttgatccaggagtccaaattcttgggtggtgacatggaacacacccatttggtgaaaggcttggattttgctctgcttcaaaaggtacgagctgagattgccagcaaagagaaagaggaagaggaactgatggaaaagccccagaaagaaaccaagaaagatgaggatcctgaaaataaaattgaatttaaaacacgtctgggccgcaatgtttaccgaatgctttttaagagcaaagcatatgagcggaatgagttgttcctgccgggccgcatggcctatgtggtagacctggatgatgagtatgctgacacagatatccccaccactcttatccgcagcaaggctgattgccccaccatggaggcccagaccacactgaccacaaatgacattgtcattagcaagctgacccagatcctttcatacctgaggcagggaacccgtaacaagaagcttaagaagaaggataaagggaagctggaagagaagaaacctcctgaggctgacatgaatatttttgaagacattggggattacgtaccctccacaaccaagacacctcgggacaaggagcgggagagatatcgggaacgggagcgtgatcgggaaagagacagagaccgtgaccgagagcgagagcgagaacgagatcgggaacgagagcgagagcgggaccgagagagagaagaggaaaagaagagacacagctactttgagaagccaaaagtagatgatgagcccatggacgttgacaaaggacctgggtctaccaaggagttgatcaagtccatcaatgaaaagtttgctgggtctgctggctgggaaggcacagaatcgctgaagaagccagaagacaaaaagcagctgggagatttctttggcatgtccaacagttatgcagagtgctacccagccacgatggatgacatggctgtggatagtgatgaggaggtggattatagcaaaatggaccagggtaacaagaaggggcccttaggccgttgggactttgatacccaggaagaatacagcgagtatatgaacaacaaagaagctttgcccaaggctgcattccagtatggtatcaaaatgtctgaagggcggaaaaccaggcgcttcaaggaaaccaatgacaaagcagagcttgatcgccagtggaagaagattagtgcaatcattgagaagaggaagaagatggaagctgatggggttgaagtcaaaagaccaaaatactaatcactagttacaaccagagatgctccacaaggatatgctccccactgttttctttctacaatttccaaaggttgcaagatgtttttttgtggatgaatataaaattttattgtgtaattacttggttccattaaaattggttaacttgctaaaaaaaaaaaaaaaaaaaaa

SEQ ID NO: 2012 - DNA, 234 bp, Homo sapiens
ggttttaatttcttgcaaggttgtaattcagtagaacaggaagggagaaactaatgcagaggaacagaaggaatgcatgagatggagaatgcctagaaatgtttgagacattgattaagtcatcagaaatggaaacaagtttagaaacaacttagagaataatacactgtaggtctgataaatattgtaagattgggagttttttgttaaattatggaaaattttatatagata

SEQ ID NO: 2013 - DNA, 3138 bp, Homo sapiens
ggcgtggtcccgggacccgccccgccggggcttttgggagcgcgggcagcgagcgcactcggcggacgcaagggcggcggggagcacacggagcactgcaggcgccgggttgggacagcgtcttcgctgctgctggatagtcgtgttttcggggatcgaggatactcaccagaaaccgaaaatgccgaaaccaatcaatgtccgagttaccaccatggatgcagagctggagtttgcaatccagccaaatacaactggaaaacagctttttgatcaggtggtaaagactatcggcctccgggaagtgtggtactttggcctccactatgtggataataaaggatttcctacctggctgaagctggataagaaggtgtctgcccaggaggtcaggaaggagaatcccctccagttcaagttccgggccaagttctaccctgaagatgtggctgaggagctcatccaggacatcacccagaaacttttcttcctccaagtgaaggaaggaatccttagcgatgagatctactgcccccctgagactgccgtgctcttggggtcctacgctgtgcaggccaagtttggggactacaacaaagaagtgcacaagtctgggtacctcagctctgagcggctgatccctcaaagagtgatggaccagcacaaacttaccagggaccagtgggaggaccggatccaggtgtggcatgcggaacaccgtgggatgctcaaagataatgctatgttggaatacctgaagattgctcaggacctggaaatgtatggaatcaactatttcgagataaaaaacaagaaaggaacagacctttggcttggagttgatgcccttggactgaatatttatgagaaagatgataagttaaccccaaagattggctttccttggagtgaaatcaggaacatctctttcaatgacaaaaagtttgtcattaaacccatcgacaagaaggcacctgactttgtgttttatgccccacgtctgagaatcaacaagcggatcctgcagctctgcatgggcaaccatgagttgtatatgcgccgcaggaagcctgacaccatcgaggtgcagcagatgaaggcccaggcccgggaggagaagcatcagaagcagctggagcggcaacagctggaaacagagaagaaaaggagagaaaccgtggagagagagaaagagcagatgatgcgcgagaaggaggagttgatgctgcggctgcaggactatgaggagaagacaaagaaggcagagagagagctctcggagcagattcagagggccctgcagctggaggaggagaggaagcgggcacaggaggaggccgagcgcctagaggctgaccgtatggctgcactgcgggctaaggaggagctggagagacaggcggtggatcagataaagagccaggagcagctggctgcggagcttgcagaatacactgccaagattgccctcctggaagaggcgcggaggcgcaaggaggatgaagttgaagagtggcagcacagggccaaagaagcccaggatgacctggtgaagaccaaggaggagctgcacctggtgatgacagcacccccgcccccaccaccccccgtgtacgagccggtgagctaccatgtccaggagagcttgcaggatgagggcgcagagcccacgggctacagcgcggagctgtctagtgagggcatccgggatgaccgcaatgaggagaagcgcatcactgaggcagagaagaacgagcgtgtgcagcggcagctgctgacgctgagcagcgagctgtcccaggcccgagatgagaataagaggacccacaatgacatcatccacaacgagaacatgaggcaaggccgggacaagtacaagacgctgcggcagatccggcagggcaacaccaagcagcgcatcgacgagttcgaggccctgtaacagccaggccaggaccaagggcagaggggtgctcatagcgggcgctgccagccccgccacgcttgtgtctttagtgctccaagtctaggaactccctcagatcccagttcctttagaaagcagttacccaacagaaacattctgggctgggaaccagggaggcgccctggtttgttttccccagttgtaatagtgccaagcaggcctgattctcgcgattattctcgaatcacctcctgtgttgtgctgggagcaggactgattgaattacggaaaatgcctgtaaagtctgagtaagaaacttcatgctggcctgtgtgatacaagagtcagcatcattaaaggaaacgtggcaggacttccatctgtgccatacttgttctgtattcgaaatgagctcaaattgattttttaatttctatgaaggatccatctttgtatatttacatgcttagaggggtgaaaattattttggaaattgagtctgaagcactctcgcacacacagtgattccctcctcccgtcactccacgcagctggcagagagcacagtgatcaccagcgtgagtggtggaggaggacacttggatttttttttttgttttttttttttttgcttaacagttttagaatacattgtacttatacaccttattaatgatcagctatatactatttatatacaagtgataatacagatttgtaacattagttttaaaaagggaaagttttgttctgtatattttgttaccttttacagaataaaagaattacatatgaaaaaccctctaaaccatggcacttgatgtgatgtggcaggagggcagtggtggagctggacctgcctgctgcagtcacgtgtaaacaggattattattagtgttttatgcatgtaatggactatgcacacttttaattttgtcagattcacacatgccactatgagctttcagactccagctgtgaagagactctgtttgcttgtgtttgtttgtttgcagtctctctctgccatggccttggcaggctgctggaaggcagcttgtggaggccgttggttccgcccactcattccttctcgtgcactgctttctccttcacagctaagatgccatgtgcaggtggattccatgccgcagacatgaaataaaagctttgcaaaggcacgaagcaaaaaaaaaaaaaaaaaaaaaaaa

SEQ ID NO: 2014 - DNA, 4868 bp, Homo sapiens; identical to SEQ ID NO: 783

SEQ ID NO: 2015 - DNA, 441 bp, Homo sapiens
tgcataggaaatgcagtacttgcttccagtaattgtattgtaatgtgagaaggtggtagcactaatggttgaatacaagagttaaactaatccacaccagctcaaaaaacctgtggagatttagttgaataagaatggacgcccacagtgattctcaaccaattacaaattttcacagaacacagtaaaactaaaagggtaactatgagagtcaatacaagtatactagaggcacagggggcccggctcataaaaacagatttcagaccaagttattaacacggggggtgtttcgtttcataacagatctcttaccatcactgggaagtggttccatcccctcccccttacaatttggaaatgggaaaacagagggtattcccgagtgggacagatttccatgtgtggtgggaaaagtccccagtggaattttgctctggt

SEQ ID NO: 2016 - DNA, 2733 bp, Homo sapiens; identical to SEQ ID NO: 51

SEQ ID NO: 2017 - DNA, 410 bp, Homo sapiens
ttcccttttgtctggctaccaatcttgcataaatatttaccacatgttatgagatgtaaacaaatccataacatagcatcactggtgaaccaacaactcaaattgccctttcaactataaatgttctattggtagtggatcacaattggtcctcttcctgctacgtagttatattttaacaacaaccaagagaaagagttcttaatctggggctcatgggttcatgaaatggttggcgaaggaagggcccacgaatcttctgaagctataagcaaaattacatgtgcaagtatgtatagcgtcctggtgagcacgtataaatttgttagtaattctcccatattcagaaaagattaattgcatcgagaatggcacaggccctcagtgaaaaggccaagaagacatgatat

SEQ ID NO: 2018 - DNA, 4201 bp, Homo sapiens
gggggcgcggccgcgctcgtctcgccgggctgttcgcgggcaggccctgccctgaagggacgaatcggcttggagcgcgggaggtggagtcggccccggcggtcgctccctggacccaacccgaggctgacccaggcccctgcccatgcggggcgcccctggctcggaagagtcccccgggccgggagcagctccaggcagcggccccggaggaagaggaagaagggacagtgctcagcttgggggacccggaccctcgccgcggcatttggagccgggggcagtcccgaactctgtgcttggcaccgccgctccgagtagggcagcgcctgccgggaccctgacccggaccccctgcgcctcgtaggcggcggcgccgccgcgccaccctgttcttccgtgtctccctctgcctggcggcagtcacggccaagaacctacattaagaaacgcattcagatgcatcagccgtttgtaaagcacctgtcgtgagccagagagtattatgagggaggccgaggacttcatgctccggacagagaaacggcgctgggattagggattgccacttctgagaggatgctgggaatctgcagggggagacggaaattcttggctgcctcgttgagtcttctctgcatcccagccatcacctggatttacctgttttctgggagcttcgaagatggaaagcccgtgtctctgtcaccgctggagtcccaggcacacagccccaggtacacggcctccagccagcgggagcgcgagagcctggaggtgcgcatgcgcgaggtggaggaggagaaccgcgccctccgcaggcagctcagcctggcccagggccgagccccatcccatcgccgaggcaaccactccaagacctactccatggaggagggcactggagacagcgagaaccttcgggctggcatcgtggcaggcaacagctccgagtgtgggcagcagccggtcgtggagaaatgcgagacaatccacgttgctattgtctgcgccggatacaatgccagccgggatgtcgtcaccctggtcaaatccgtcctgttccatagacggaaccctctgcacttccaccttattgctgactccattgcggagcagatcctggccacgctcttccagacctggatggtgcccgctgtgcgtgtggacttctacaatgcagacgagctcaagtctgaagtttcctggatccccaataaacattactctgggatttatggtctgatgaagcttgtcctgaccaagactcttcctgccaacctggagagagtcatcgtccttgacacggatatcacctttgccactgacattgcagagctgtgggctgtgttccacaagttcaaaggtcagcaagtcctgggcttggtggagaaccagagtgactggtaccttggaaacctgtggaaaaatcaccgcccatggccagcccttggaagaggctacaacacaggggtgatcctgttacttctggataagctgcggaagatgaaatgggagcagatgtggaggctgaccgcagagagggagctcatgggcatgctctctacatccttagctgaccaggatattttcaatgccgtcatcaaacaaaaccccttccttgtgtaccagctcccctgcttctggaatgtgcagctgtcagaccacacccgctccgagcagtgctacagagacgtgtctgatctaaaggtcattcactggaactcccccaagaagctccgggtgaagaacaagcatgtggagttttttcgcaacctctacctgaccttcctggagtatgacggcaatcttctgaggcgggaactgtttggctgccccagtgaggctgatgtcaacagtgaaaacctccagaagcagctgtctgagctggacgaggacgacctgtgctatgagttccggcgagagcgcttcactgtccaccgcacccacctgtacttcctgcactacgagtatgagcctgcagcagacagcacggacgtcaccctggtcgctcagctgtccatggacaggctccagatgctggaggccatctgcaagcactgggaggggcccatcagcctggccctctacctgtcagacgccgaggcccagcagttcctccgctacgcacagggctctgaggtgcttatgagccgccacaacgtgggctaccacatcgtgtacaaggagggccagttctaccccgtgaacctgctgcgcaacgtggccatgaagcacatcagcactccctacatgttcctgtctgacattgacttcctgcccatgtatgggctctatgagtacctcaggaagtctgtcatccagctcgatcttgccaacaccaagaaagcaatgattgtccccgcgttcgagacactgcgctaccggctgtccttccccaagtcaaaagcggagttgctgtcaatgctggacatggggaccctcttcacattcaggtaccacgtctggacgaaaggccacgcacccacaaacttcgccaagtggcggaccgccaccacgccttaccgggttgagtgggaggccgattttgagccgtatgttgttgtgagacgtgactgcccggagtacgaccggaggtttgtaggctttggctggaacaaagtggctcatatcatggagctggatgtgcaggagtatgagttcattgtgctgcccaacgcctacatgatccacatgcctcatgcccccagcttcgacattaccaagttccgttccaacaagcaataccgcatctgtctcaaaaccctcaaggaagagtttcagcaggacatgtcccgccgctacggctttgctgccctgaaatatctcacagccgagaacaacagctagcaccaagaagcccaccactagggggagacatgctgtaggggaagtgccactcgctgtttggggcccggccttcaaattcaaaattgagccatgctttttcggtttgtttttatttatctctttggcccagccaagctgccctcactacagagaccttggacaaggatccagccagtccctctctgccccacaaccctgcattcccagaggttagctatgcagcccacctagatgagtctcttcaagaatgggaaatcaaggggtgacagggagtaaaagggttatcatcttactgcaaagccacaagatcagggcagggctttaggatgttctggatgctttttaataattatgcttcccatcataactggggagaaagggaagtcagggttctaggggttattcgtcccaggaaatagaagtgaaattgtctttattaagtgaaaactttcccctttgccctgcaatgtagctgggcattcaaacggagggcaaaccgatgatctaaaccaaccacttggaaaaacccaatggggacattgtaaccagagggtcctggaggtggggttgatgggtttccttatccccaaagtcactcctgttttgttttgtttttctttgggggttttgtttatttttggggctggcaatccaaaatagaaaatctgatcctttgaggctctaaaggaaaatcagctgcctctaccaaccaccctctatcagcagtggcccaggaaggaggtcaagcatcttcggccgatatttaaacatgggcagcttccttcaggatgatcaccgaggctcccgtgactttgaactccctactctccagaatccaggggctatagcgatggggactgcggaattacgagggctggctgttttacaccggtcacattttctattggcagtgactgattcatgggaaagggctttgaaggaactacttcagtgcacacacaaggtacgaacctctcaggcctttcgaagaactttcataattcatgaaagcccagttctgaagattcacgtatccatctggagacctacaggaagaaagtgattgggttcctctggttcttgcctgcttcactgtggatgggaagaggtgacaacctcagtctccctttgggacctgtccaagggtaggcaaccaccttcaccttcacacagattgaggagacactggactttttacccattttctttaatcttcaatattaatattgtgtttacattgatgagaacaagagttaatgccctaccctctgctgggctgtttgtattgagttgcaatgtgaccagcgaaagctgcatttaataaatgaaagtacagactgtttcttcccca

SEQ ID NO: 2019 - DNA, 3385 bp, Homo sapiens
ctctacctactttgcccagctccacctcggcagtgcagcgtgttttggtggccttcctccgcacgccctggagggggagtgccctgcaccccggggctgctccggagcccagtgcacgagtgcacatgggcttccctcctttgcttaaagggcaggcgagcgctactcgctccagccttgcctcctgcagctgggtggtcttttttctctcctgtctttcaagacacgcgcccgaaatcgagggagggagacgatggactgagctgatccgcaccatggagtctcgggtcttactgagaacattctgtttgatcttcggtctcggagcagtttgggggcttggtgtggacccttccctacagattgacgtcttaacagagttagaacttggggagtccacgaccggagtgcgtcaggtcccggggctgcataatgggacgaaagcctttctctttcaagatactcccagaagcataaaagcatccactgctacagctgaacagttttttcagaagctgagaaataaacatgaatttactattttggtgaccctaaaacagacccacttaaattcaggagttattctctcaattcaccacttggatcacaggtacctggaactggaaagtagtggccatcggaatgaagtcagactgcattaccgctcaggcagtcaccgccctcacacagaagtgtttccttacattttggctgatgacaagtggcacaagctctccttagccatcagtgcttcccatttgattttacacattgactgcaataaaatttatgaaagggtagtagaaaagccctccacagacttgcctctaggcacaacattttggctaggacagagaaataatgcgcatggatattttaagggtataatgcaagatgtccaattacttgtcatgccccagggatttattgctcagtgcccagatcttaatcgcacctgtccaacttgcaatgacttccatggacttgtgcagaaaatcatggagctacaggatattttagccaaaacatcagccaagctgtctcgagctgaacagcgaatgaatagattggatcagtgctattgtgaaaggacttgcaccatgaagggaaccacctaccgagaatttgagtcctggatagacggctgtaagaactgcacatgcctgaatggaaccatccagtgtgaaactctaatctgcccaaatcctgactgcccacttaagtcggctcttgcgtatgtggatggcaaatgctgtaaggaatgcaaatcgatatgccaatttcaaggacgaacctactttgaaggagaaagaaatacagtctattcctcttctggagtatgtgttctctatgagtgcaaggaccagaccatgaaacttgttgagagttcaggctgtccagctttggattgtccagagtctcatcagataaccttgtctcacagctgttgcaaagtttgtaaaggttatgacttttgttctgaaaggcataactgcatggagaattccatctgcagaaatctgaatgacagggctgtttgtagctgtcgagatggttttagggctcttcgagaggataatgcctactgtgaagacatcgatgagtgtgctgaagggcgccattactgtcgtgaaaatacaatgtgtgtcaacaccccgggttcttttatgtgcatctgcaaaactggatacatcagaattgatgattattcatgtacagaacatgatgagtgtatcacaaatcagcacaactgtgatgaaaatgctttatgcttcaacactgttggaggacacaactgtgtttgcaagccgggctatacagggaatggaacgacatgcaaagcattttgcaaagatggctgtaggaatggaggagcctgtattgccgctaatgtgtgtgcctgcccacaaggcttcactggacccagctgtgaaacggacattgatgaatgctctgatggttttgttcaatgtgacagtcgtgctaattgcattaacctgcctggatggtaccactgtgagtgcagagatggctaccatgacaatgggatgttttcaccaagtggagaatcgtgtgaagatattgatgagtgtgggaccgggaggcacagctgtgccaatgataccatttgcttcaatttggatggcggatatgattgtcgatgtcctcatggaaagaattgcacaggggactgcatccatgatggaaaagttaagcacaatggtcagatttgggtgttggaaaatgacaggtgctctgtgtgctcatgtcagaatggattcgttatgtgtcgacggatggtctgtgactgtgagaatcccacagttgatcttttttgctgccctgaatgtgacccaaggcttagtagtcagtgcctccatcaaaatggggaaactttgtataacagtggtgacacctgggtccagaattgtcaacagtgccgctgcttgcaaggggaagttgattgttggcccctgccttgcccagatgtggagtgtgaattcagcattctcccagagaatgagtgctgcccgcgctgtgtcacagacccttgccaggctgacaccatccgcaatgacatcaccaagacttgcctggacgaaatgaatgtggttcgcttcaccgggtcctcttggatcaaacatggcactgagtgtactctctgccagtgcaagaatggccacatctgttgctcagtggatccacagtgccttcaggaactgtgaagttaactgtctcatgggagatttctgttaaaagaatgttctttcattaaaagaccaaaaagaagttaaaacttaaattgggtgatttgtgggcagctaaatgcagctttgttaatagctgagtgaactttcaattatgaaatttgtggagcttgacaaaatcacaaaaggaaaattactggggcaaaattagacctcaagtctgcctctactgtgtctcacatcaccatgtagaagaatgggcgtacagtatataccgtgacatcctgaaccctggatagaaagcctgagcccattggatctgtgaaagcctctagcttcactggtgcagaaaattttcctctagatcagaatcttcaagaatcagttaggttcctcactgcaagaaataaaatgtcaggcagtgaatgaattatattttcagaagtaaagcaaagaagctataacatgttatgtacagtacactctgaaaagaaatctgaaacaagttattgtaatgataaaaataatgcacaggcatggttacttaatattttctaacaggaaaagtcatccctatttccttgttttactgcacttaatattatttggttgaatttgttcagtataagctcgttcttgtgcaaaattaaataaatatttctcttaccttataacac

SEQ ID NO: 2020 - DNA, 554 bp, Homo sapiens
tttttttttttttttttttttttttttacccctgagggcatcatataaagaattccaggctagcctcctggaggatgagagaacatgtggaacagagatgagtcatcccaggggaggcctccccagaccaaccatcctagaatggggggtaacaacctttttcttaaaggaccagcaggaaatactttaggcctgtgggcactatgatcatctccattccaaatactcagctctgctgttgtagtgcagaagcagccatagacgatatgggagtggctgtgttccaataaaaccctatttataaaaacaggtggcaggcctgtgggctatggttcgcctacctctatcccagattattcagccccagtcgagccagtccaaactagaagaactgcccagccaactcacagaatcgtgagaaatagtaaatgcttgttgttttaagccactaaatttggaagtgttgttacacagctaatgctaactgatgaaaatggtataaaacacataaagcatacaccctgtttcaaggcacttaaaatccccctgtggaa

SEQ ID NO: 2021 - DNA, 5143 bp, Homo sapiens
agttggaaagagaccacagactttgagggaagctcactcaggatctgctctccggcaaagtagtaagtgaggtgctgagagcagaatgagctactttgtggattctgctgggagcagccccgtcccttactcagcgcctcgtcctgcagtggtgaggcaaggacctagcaacacttatgaagatcctcgaatgaactgtggtttccagtccaattatcaccagcaaagaccttgctaccccttttgggatgagatggcaactcaggaagttcctactggtcttgaacactgtgtctcagatatggaatgtgcagatgtcccactattaactccaagcagcaaagaaatgatgtctcaagcattaaaagctactttcagtggtttcactaaagaacagcaacgactggggatcccaaaagacccccggcagtggacagaaacccatgttcgggactgggtgatgtgggctgtgaatgaattcagcctgaaaggtgtagacttccagaagttctgtatgaatggagcagccctctgcgccctgggtaaagactgctttctcgagctggccccagactttgttggggacatcttatgggaacatctagagatcctgcagaaagaggatgtgaaaccatatcaagttaatggagtcaacccagcctatccagaatcccgctatacctcggattacttcattagctatggtattgagcatgcccagtgtgttccaccatcggagttctcagagcccagcttcatcacagagtcctatcagacgctccatcccatcagctcggaagagctcctctccctcaagtatgagaatgactacccctcggtcattctccgagaccctctccagacagacaccttgcagaatgactactttgctatcaaacaagaagtcgtcaccccagacaacatgtgcatggggaggaccagtcgtggtaaactcgggggccaggactcttttgaaagcatagagagctacgatagttgtgatcgcctcacccagtcctggagcagccagtcatctttcaacagcctgcagcgtgttccctcctatgacagcttcgactcagaggactatccggctgccctgcccaaccacaagcccaagggcaccttcaaggactatgtgcgggaccgtgctgacctcaataaggacaagcctgtcattcctgctgctgccctagctggctacacaggcagtggaccaatccagctatggcagtttcttctggaattactcactgataaatcctgtcagtcttttatcagctggacaggagatggctgggaattcaaactttctgacccagatgaggtggccaggagatggggaaagaggaaaaacaaacctaagatgaattatgagaaactgagccgtggcctacgctactattacgacaaaaacatcatccacaagacagcggggaaacgctacgtgtaccgctttgtgtgtgacctgcagagcctgctggggtacacccctgaggagctgcacgccatgctggacgtcaagccagatgccgacgagtgatggcactgaaggggctggggaaaccctgctgagaccttccaaggacagccgtgttggttggactctgaattttgaattgttattctattttttattttccagaactcattttttaccttcaggggtgggagctaagtcagttgcagctgtaatcaattgtgcgcagttgggaaaggaaagccaggacttgtggggtgggtgggaccagaaattcttgagcaaattttcaggagagggagaagggccttctcagaagcttgaaggctctggcttaacagagaaagagactaatgtgtccaatcatttttaaaaatcatccatgaaaaagtgtcttgagttgtggacccattagcaagtgacattgtcacatcagaactcatgaaactgatgtaaggcaattaatttgcttctgtttttaggtctgggagggcaaaaaagaggtgggtgggatgaaacatgttttggggggggatgcactgaaaatctgagaactatttacctatcactctagttttgaagcaaagatggacttcagtggggaggggccaaaaccgttgttgtgttaaaatttattttattaaattttgtgccagtattttttttcttaaaaatcgtcttaagctctaaggtggtctcagtattgcaatatcatgtaagtttgtttttatttgccggctgaggattctgtcacaatgaaagaaaactgtttatatagaccccattggaaaagcaaaacgctctcactgagatcagggatcccaaattcatgggacttatataagaaggacaattaatgctgatttgggtacaggggaattatgtgtgtgaatgtcatctacaattaaaaaaaattagcacatccctttacttacttgttatcagtggattctcggggtttggacttaatgttgagctaagaagcattaagtctttgaactgaatgtattttgcatccctggttttggacgacagtaaacgtaggagcactgttgaagtcctggaagggagatcgaaggaggaagattgacttggttctttcttagtcctatatctgtagcatagatgacttggaataaaagctgtatgcatgggcattacccctcaggtcctaagaaataagtcctgaatgcatgtcgttccaaactaacactctgtaatttttcttttatgtcttattttccaagagtcctccattttttgcaccccctcaccgccaactctgttattcagtagagagaagtgtacggctttctgattggtgagtgaaaaagtaacttgagacacgacctaagttgaagagtttagacttgctgagttttagaagtgatggaaattaagagagcatttcaataaaatgtgacttggctgtctttggaagagaagtgcaaggctttcctttgaagaatttaaattagtccggtaggatgtcaggtgagactgtgtatgcaaaatgaatggcacaggtgatgccagggcctcttgcttgggtctgatgtcttggcacagggtaagtgaaggttaattccagaagagaggaatgacttgaaggcaaaggaaactaaggaaggaggttcagtgaggaaaataaggttgtccatgagatttgaatagatttttagttcccccaaggtttaaatacaaacatagtcaagcaaggtagtcatctttctgctggttgtgagggggaatctgaaaatggagttttagaggaaaagtcaacatctaactagtgaggaaaagtgcctaatacaattagaatctccctcactctatagttgcccagttgaaaggataaggaggaggggtggcttttatggacttccatgagagaaggaaagaaatatttcaggtaagcttctcagggctggccctttttgggatttggatgagaaattggaagtactaactactttctagcatatctttaagaaaattgattgttatttactcccagatcctcttgcagacccagaattatcaggaacatagctctgtgattcatgagtgtccccatactgatgaattggagcatccatatggaaagcaaaggcagaattatcccagctgtattattttgatcttttggatgcaggtgccttaatgaagctctcaaaatattttaggagctgctcagggagtgttgggtggaactgtttggactacattgttttctcttagattatgtgatttttgttgggcactggcaaaaggtgtgtgtgtgaatgtgtgcatgtgtgtgaatgttgtgtgtgtgtgtgtgtgtgtgtgtgtgtgtgtgtgtgtgtgtgtttgcagacatgcaaaactgcagctgaaataataccttagatttctaggtaagtctttccacatttcaataatgggtaagagtagaaccagggccgggtatcaattattgcttgctgtttgcaaccaggcataaaatcactttctcaaatcatccaccgttcctattaaatttatgccggaaactctccttctgtgagtataactcctgcagttcctatagcagataagatataagaaagtgcctcctagtgctcctccgcccgcttgtttgctaaaattccctttctctctaagtccaccattttcaagatttgtagatagtgtattagttaagacagctttgtcgatctggccagatgttttttctcctttgtccaaaggccagagaccatcccaggaagagtggtgggtggtttatacactggaaatgttgcgtttatgctttttaaaaacacacgttaacttcagaggaaggatgggcaaatctggtctagctgggtgaaacccttattttcccagagatgccttaacctttgttggttttggctttagggttcagagtcacttttgttcccttctccattctggagagggacttcccctacatagagccctgatttttgtggctgtggggattggaggtagcattcaaagatcagatgtgcttttcctcactttggagatgaacactctgggttttacagcattaacctgcctaaccttcatggtgagaaatacaccatctctcttctagtcatgctgtgcatgccgcttactctgttggggtctatataaatttgttgaactcttacctacattccaaagaagtttcaaggaaccataaatatatgtatacatatacatatataaaatatatatattaaaataaaattatcaggaatactgcctcagttattgaacttttttttttaagaatactttttttttaagctgagaagtatagggatgaaaaagatgttatattgtgtttgactattttccaacttgtattttcatataatttatattttttaaaagctgaaaatttagaagcaagatgaaaaaaaggaaaagcaggtgctttttaaaaatcagaactgaggtagcttagagatgtagcgatgtaagtgtcgatgtttttttaaaaaaaaatgcaaaaaaattcttatggcggagttttttgtttgtttattttagtagctgatgctggcacatcattttgctggagagttttttatatactgtagcctgatttcatattgtattttaaactgtgtgaaattaaaaacaaagaatttcattcataatgct

SEQ ID NO: 2022 - DNA, 1714 bp, Homo sapiens
actttcttgagtggccaatccggttgtaggctcacctcccccttctactcagagcactgctgcggccgccgccattttagcgttttgtcagaagcgtccgcgccgcgaggaggaggccctgctggtttctgtgcgggctcttgtcaggatggtgaagctgttcatcggaaacctgccccgggaggctacagagcaggagattcgctcactcttcgagcagtatgggaaggtgctggaatgtgacatcattaagaattacggctttgtgcacatagaagacaagacggcagctgaggatgccatacgcaacctgcaccattacaagcttcatggggtgaacatcaacgtggaagccagcaagaataagagcaaaacctcaacaaagttgcatgtgggcaacatcagtcccacctgcaccaataaggagcttcgagccaagtttgaggagtatggtccggtcatcgaatgtgacatcgtgaaagattatgccttcgtacacatggagcgggcagaggatgcagtggaggccatcaggggccttgataacacagagtttcaaggcaaacgaatgcacgtgcagttgtccaccagccggcttaggactgcgcccgggatgggagaccagagcggctgctatcggtgcgggaaagaggggcactggtccaaagagtgtccgatagatcgttcaggccgcgtggcagacttgaccgagcaatataatgagcaatacggagcagtgcgtacgccttacaccatgagctatggggattcattgtattacaacaacgcgtacggagcgctcgatgcctactacaagcgctgccgtgctgcccggtcctatgaggcagtggcagctgcagctgcctccgtgtataattacgcagagcagaccctgtcccagctgccacaagtccagaatacagccatggccagtcacctcacctccacctctctcgatccctacgatagacacctgttgccgacctcaggagctgctgccacagctgctgctgcagcagcagccgctgctgctgttactgcagcttccacttcatattacgggcgggatcggagccccctgcgtcgcgctacagccccagtccccactgttggagagggctacggttacgggcatgagagtgagttgtcccaagcttcagcagccgcgcggaattctctgtacgacatggcccggtatgagcgggagcagtatgccgatcgggcgcggtactcagccttttaaagcttgaggtgggatgtgtgtgggctgaaattccgagctgcggttgtgcatgagaatacacccttcgtggtaccccatctccgggacgttctcggctctgtgcgttcagtccctcaggaaccgtggaccttaatttaccttgctaagttcagaccttctcttcctttcctttcctttcctctcctgcccattttcctgttcttctgtccttcaatacttctgtagcttcccattcatgttctcttctcccagcaggcctcattgtgtgcagaaactgtggtgggggctgtgctgtctcctccctgcctcctgcctcctgcggctgttggatttgggaatgaccttggtgagagtctcactgctccagggtctctttttggtccaaaggctagacctatagagttggatcactttttttctttccggtgaaataaatggtttttcaacttagggtaaaaaaaaaaaaaaaaa

SEQ ID NO: 2023 - DNA, 453 bp, Homo sapiens
ttttttttgaaaataggagattccagtctacccgaatcagtgtaatacggaaatgctcactgttttaacccttaaaagaaaagtaatctgatgttaaccaatcagcattttttcctgttacagttctcaccttacaaaacccactgctttgccactgcccagtgagacctctcattctattttgtagaatggaggctgatccgattcatgcatcttgaataaaagccaattagatctatgattaaatttgttgtaattttgtcttttgacaacatgtatattaaaagtactcaatctttttgttattgtttttgatagaaaaaataactatgctacacttatccacagtccttggtcagccaacttcaggctcaaatatgtcacattacattctacaacttgctttaaaaataaatgtgcagaacttgagaagcaaaaataatactactcagc

SEQ ID NO: 2024 - DNA, 2608 bp, Homo sapiens
gcggagctccgcatccaaccccgggccgcggccaacttctctggactggaccagaagtttctagccggccagttgctacctccctttatctcctccttcccctctggcagcgaggaggctatttccagacacttccacccctctctggccacgtcacccccgcctttaattcataaaggtgcccggcgccggcttcccggacacgtcggcggcggagaggggcccacggcggcggcccggccagagactcggcgcccggagccagcgccccgcacccgcgccccagcgggcagaccccaacccagcatgagcgccgccacccactcgcccatgatgcaggtggcgtccggcaacggtgaccgcgaccctttgccccccggatgggagatcaagatcgacccgcagaccggctggcccttcttcgtggaccacaacagccgcaccactacgtggaacgacccgcgcgtgccctctgagggccccaaggagactccatcctctgccaatggcccttcccgggagggctctaggctgccgcctgctagggaaggccaccctgtgtacccccagctccgaccaggctacattcccattcctgtgctccatgaaggcgctgagaaccggcaggtgcaccctttccatgtctatccccagcctgggatgcagcgattccgaactgaggcggcagcagcggctcctcagaggtcccagtcacctctgcggggcatgccagaaaccactcagccagataaacagtgtggacaggtggcagcggcggcggcagcccagcccccagcctcccacggacctgagcggtcccagtctccagctgcctctgactgctcatcctcatcctcctcggccagcctgccttcctccggcaggagcagcctgggcagtcaccagctcccgcgggggtacatctccattccggtgatacacgagcagaacgttacccggccagcagcccagccctccttccaccaagcccagaagacgcactacccagcgcagcagggggagtaccagacccaccagcctgtgtaccacaagatccagggggatgactgggagccccggcccctgcgggcggcatccccgttcaggtcatctgtccagggtgcatcgagccgggagggctcaccagccaggagcagcacgccactccactccccctcgcccatccgtgtgcacaccgtggtcgacaggcctcagcagcccatgacccatcgagaaactgcacctgtttcccagcctgaaaacaaaccagaaagtaagccaggcccagttggaccagaactccctcctggacacatcccaattcaagtgatccgcaaagaggtggattctaaacctgtttcccagaagcccccacctccctctgagaaggtagaggtgaaagttccccctgctccagttccttgtcctcctcccagccctggcccttctgctgtcccctcttcccccaagagtgtggctacagaagagagggcagcccccagcactgcccctgcagaagctacacctccaaaaccaggagaagccgaggctcccccaaaacatccaggagtgctgaaagtggaagccatcctggagaaggtacaggggctggagcaggctgtagacaactttgaaggcaagaagactgacaaaaagtacctgatgatcgaagagtatttgaccaaagagctgctggccctggattcagtggaccccgagggacgagccgatgtgcgtcaggccaggagagacggtgtcaggaaggttcagaccatcttggaaaaacttgaacagaaagccattgatgtcccaggtcaagtccaggtctatgaactccagcccagcaaccttgaagcagatcagccactgcaggcaatcatggagatgggtgccgtggcagcagacaagggcaagaaaaatgctggaaatgcagaagatccccacacagaaacccagcagccagaagccacagcagcagcgacttcaaaccccagcagcatgacagacacccctggtaacccagcagcaccgtagcctctgccctgtaaaaatcagactcggaaccgatgtgtgctttagggaattttaagttgcatgcatttcagagactttaagtcagttggtttttattagctgcttggtatgcagtaacttgggtggaggcaaaacactaataaaagggctaaaaaggaaaatgatgcttttcttctatattcttactctgtacaaataaagaagttgcttgttgtttgagaagtttaaccccgttgcttgttgttctgcagccctgtctacttgggcacccccaccacctgttagctgtggttgtgcactgtcttttgtagctctggactggaggggtagatggggagtcaattacccatcacataaatatgaaacatttatcagaaatgttgccattttaatgagatgattttcttcatctcataattaaaatacctgactttagagagagtaaaatgtgccaggagccataggaatatctgtatgttggatgactttaatgctacattttaaaaaaagaaaataaagtaataatataactcaaaaaaaaaaaaaaaaaaaaaaaaaaaaaaaaaaaaaaaaa

SEQ ID NO: 2025 - DNA, 6693 bp, Homo sapiens
gagcaggcgttcccgactccggcaagagggtcagtgtggaggcgggagcccgggcggccggcttgaactccgtgcacgcgggcctggagctgcgcccctgcgtcttttcccgacttctgatccgcagaggggcactcggagccccagcctgggtcgcagtgccttcggtctgcgggcctcagtttctcggtggcgcctggactctcgccctcagagggaggcccgtcccacggtctgtggctacggatcccaggaccctcttcgcgggcgattcgcgtagcctcagattgcctcggatgatggcctgcgactgacagtctctcagctcttctcagctctcctgaggctgcagctgtcagctccctgatcctcagcacttgcctggaccagtgcgggtctgccacgccctgttcagccatccctgtcctgttgtgtcgtgcaagccacatctgtccacacccccaccacccaccagtgctggctctcctctcttctcccctgtgctcccagcatgcctcgtggccggtgccgtcagcagggccctcgcattcccatctgggcagccgccaattatgccaacgcacatccatggcagcagatggacaaggcgtctcctggggtggcatacaccccccttgtggatccctggattgagcggccctgctgtggggacaccgtgtgtgtgcgaacgaccatggagcagaagagcacagctagtggcacttgtggcggtaaacctgcagaaaggggtcccctagctgggcacatgcccagctcccgaccccacagggtggacttctgctgggtaccaggctcagacccaggcacctttgatggctccccgtggctactggaccgcttcttggcccagctgggcgattacatgtccttccactttgagcactatcaggacaacatcagccgtgtctgcgagatcctcaggcgcctaacaggccgagcccaggcctgggcagccccctaccttgatggggacctgcccctgcctgacgattacgagctcttctgccaggatctcaaggaagttgttcaagacccgaacagttttgctgagtaccatgctgtggttacctgtcccctgcccctggcctccagccagctgccagtggcccctcagctgcctgtggtgaggcaatacttagctaggttcttagagggcctggcactcgacatgggtactgcccccaggtctttaccagccgccatggccacccctgctgtgtctgggtccaactctgtatctagaagtgctctgttcgagcagcagctgaccaaggagagcacccctgggcccaaggagcccccagtcctgcccagttctacatgtagctccaagcctggtcctgtggaaccagcctcttcccagccagaggaggcagcccccacacctgtccctagactgtcggagtcagctaatcctcctgcccagagaccagacccagctcatccaggaggtccaaaaccccagaaaacagaggaggaggttttggagacagagggagaccaggaggtgtccttaggtaccccacaggaggtggtggaggccccggagaccccaggagagccaccactttctcctgggttctgaacacagcccaggtgggaacaatgctgcccctcatgatgaagtggcctgtgtggcttgagcgccccatagtccccagtcagagcagagtggtgtccccagatgacttcagaccccatagctgggcaagatgcgcttgttttggactctgcgctgagcagaaccagctcccccaactccagcagagcttgacctccgccctgtgccctttccctgctgctggctctctgctgcatccctgcccgtcttctgggagtgccgtctcacccaggcctgctcccacgagggggtcgttttgtagatcaactctcagcagatagttgcatcatctttgtcacctccacccccataaaacaccccccttggtgtcttccacactggctgggactgaactgggtctgccacgtctgccctgttgggacctcgttcctgtatggggtttctgtgtctgtccccctagccccaccctctctgctccctgtgacttctgtcccagctggaatgtgaggaaggctgcctggaggaagtggccactttgattctgggggatgagtgggatagcatcttggcaaagaatgatgtttcctgtgggattaccagcagttctgggcagctggaaggtttggatgcaggaaggtgggatgcaagccccttgccaggctcagctgcaggcattcgccctttgtgtgttaacactgtagctctaatcgtgcctggtgttctgaagcaggctcctcttccctgctgctgtgctgccatcccctgctcactccgcactcgcatgcattgcggattcagcacttaagccctagtgtgtaaatgacttggatctccctcctggcagactgtgaccctcagcacaggggctctgtcttagtcagctctgtggcctggtacacaattggtgctcattaaacacgtgttggattactggctgaggtggtgcagtggctgcctaccagcaagtctttgtttcccattctgtcaggagcagaggcctggccatgagcattccaggtcagcattgcagctgtggtttctggcaggggctttgagggtccaagggtctgatcaaagaagctgggtggggctgagtagggggtgggtggctctgcaggtagagaactgacttccgagagctgtaggtgaagtgaggaccaggcagcagtccagagctgtgaggccccaggcccagaggaatggaatgaagaaagacctgttccacacaaggaggggttttctagtggaagctgagcttggaagctcctggagccaagtttaccacaggataggcaggtacagccgcccagtgtgtgcagtgtgtgcccactctggtgcttggacaagaagttcaagtccctttcaggtttacaattgtgaaaacaacaaaacaacaccttcctggaaagtaggaagaaaaagcagaaatgtgaattggaaatacagccaactattttaggaaaaactaattagcaagcatctgattaaacttattcagaaactggccgggagcagtgtctcacacctgtaatcccagcactctgggaggccaaggtgggtggatcacctgaggtcaggagttcaagaccagcctgaccagcatggagaaatccatctctcctaaaaatacaaaattagccaagtgtggtggtgcatgcctgtaatctcagctacttgggaggctgaggcagaagaattgcttgaacccaggaggcagagggtgtggtgagccgagatcacgccattgcactccagcctggacaacaagagtgaaactccatcccaaaaaaaaaaaaacaacaaaaaacaaaaaccttatttagaaaaatataaattgttgggattattttatggtaactatcactagaaaaggctctgggttcagatggttttatgtgtgagttatttcagggcacagataccttgtaggtaaaacaactggaaaccttggaaataggtgggaagctatttttagaaagcaggtatagccctggtagcaaagcaagtgagctggcagaagaaacccattttcagtcttgattctggtcagatgtgagaagtccctggatgtcctggcccagccccatgcttctgtgccaggtcacagctgccctccgtccgatgactcaggccccatccccccttttgtgggttgggtcagactgctccctgatgcctacctccagtgcactgtggcctggctcacctgtgggtctggcagtagaacccagagttgctctctaggatggacagcctagtcacccagctgacctttaccctgtcccacaggcttctggacaggccaccttccccatctccctttagtggacctgaagtggatactccagcctgggattgctgccttctcttttgaaccctgtcctattggggctttggggcttttgtgcccttgggacccaggcagctcctgggggtgtgtgagttatggtctgccgtgtgtctgagggccagtcatgcagcatccacctaggcaggcttgagagtccttgggagagtccaggtgacctggtttttaattaaaacgcgtcctgtttattgtggttgggctctgcccagaaaggaaggtagggccttgaagtggtgatgtccaggtttcctgcacaggtagggtggaggcaacgatggactctggcatggccttccagacaggcagtgcacacagctcctttcagagtggctttgttgccagctgctgcagcacctgctttcagacagatgatgaccaagctgctttcctgctgggggaaggaggcattccccctgggttgtttttctcttctggcccccacacactggcagacccgaaggcagggtgctcaggagctgcagagcctggcagggtttgctggacatgctcagggacgggccatggtgctggctctgctttctaatcatggtgtcagtccttcacttcccttggaaatacccagagattttatttcctgaagataggacatgatgggtgctgtgagatggtatttaaagtacctgtctgcaaggaaaactttaaaataggaagtactaaggataaggtcctatgggatattggaatattttataaagccacaatagttaaagcacttagatgtggacagatgagcagagaatagaggactttgaaacgggccaaataaatatggaaatttagtacaggctagaggtgtttccaattaacgagtaaaatggattattcagtaaaagcagttggccctctggaaaatagtaaagccatgtatgtgcctcactctttatgccagtacatattccagattaaagatttcaatgttacaattatgaaagtactagaggaaaatatgggtgaatttttttttttttttttttttgcctatgattccaggattttaaaagttttagatgcccagagttgtggaggtatggagaagtggaccttctcatactgttggtgggaatacacaataatataatttgaccacgtaacaattctaggcacatgcatgctgtgactacttgctaggtgcatgaaggctcttgccaggggtggtcatggttcggtaccactacatgggggtttagagcagggactggaggttggccttgcctcctcccctccccgcatgagctgagggtccttacctgacctttttgagctgtgaccagagtttttcctcatggggtggttagaagggttgaatgagaatgatgcccatgcagtgccttggctggggtctgggccctctaacacccacctcatgggtgtcactgttttttgaacagcagaactggaaaagcccaaagatccagcaataaaggagcaaggcaaataaagctgttaccctgcaggatcagtcagcatgagccagattgtgctgcagtaacaaagatctccaacagcgcagcggctacagttggcactgcttatttcttgcttgcacctgtgggccaccgtggctggggcctgtcagacctgtgctgacgacagcctacctggacatatttctccatgctcactgaggcaggggaaaggccacagcaggccacaagtaatgtgtgtcaccccacttccatttctgtggccaaaggaagccacagagccacacctgagttccataggacggcagcagctgatcatcctatgggctggggtgctcagtatggagaagtacaagcagccacccagcgtggggctggttggtgctgctgaggatgggaggatgggaggggcctgcatccatcccagggcaacatacctgtttgtctgctggggctgcctgacaaaggaccgcaggctaggggacttaaacaacagacatttcctcatgattctggagctagaagcctgagatcaaggtgtgggcagggttggtttctcctgaggcctcgctccttggcctgcagatagccatcttcttgccgtgtccctgtctgtgtctgtgtcctaatctctcataagctcactagtctattggatcagggcccaccctcatgacctcatttaaccctgaattacctctttaaagaccctgtcttcaaatgtaagtactaggggttaggacttgaacataaaaatattgaagggacatagttctgcccacagcggtgcccgcgataggcttctctggttttgtctttgctgttcctggcagcgctatattgggcaggcttctgtggtctccacatgcctgtgtgcagagtcccccaggccctgggttctggggcccatactgaggagtggggatggccaagccttggctgttgagtaggcagtgcccagttgtgctgtatgggatgctgtttctcacttaagaaatctttccctacctggggggtacaaaggcattatcctgtattcccaggttgtaactttctgcctttgacattcaaccttgagtccacctgtaagtgtaactgcggcagaagggaggggtctgctgtcatccttgatagcctgtgatgagcagagcccctctgccgaccgcgatgcacatgtaatatgagcaagaaataaatttttgatgtgcgaagccactgaaaaaaaaaaaaaaaaaaaaaaaaaaaaaaaaaaaaaaaaaaaaaaaaaaaaaaaaaaa

SEQ ID NO: 2026 - DNA, 430 bp, Homo sapiens
agaagtaaaaatacatgtttgagagccttatatttgggagttttgtgttgtattttttttttccttacagtgctagattctttcccttaattccacacagaacccatcgctacaatatgtgagcagatgaaaccctgattagtcccagaatgctacgaaggggaagaggaggacgtttattagagtatgctgagctgctgtggaatgacagaaaaacaaagtctctgcaagaatacaaagatttacttctgccatcaccgtcaactacgtcagggacctggagccctttgctggatgcagctggtccttccatggggctgcttacctcatgggatgctcagacaaacatcttcttttcttttgggattcagatatgagcaatattatcttgcatcacatatgattacaataaaaatatacaatgtctttc

SEQ ID NO: 2027 - DNA, 2741 bp, Homo sapiens
gtgaggcggaagctgtgtatggcgggaggctgtggcggtcccttggtggggaagctgttgctgttgctagacgacgggaactagctctcgtcacttcctcagcccgccgtctgcccactcctctagccggaacctgggggcccggagccggggtaggcacagagttgtcctcggaggtccaggacagcggccagcccggcggcgggagtcagggccacgccacctgcagggaagaacccgagtcgaagcgggaagatggctgcagacaagcctgcagatcagggagcagagaaacatgaaggcacaggtcagtcctctgggatcactgatcaagagaaggagttatccaccaatgctttccaagctttcacatctggaaattatgatgcctgtctacaacaccttgcctgtctacaagatataaacaaagatgattataaaataattttgaatacagcagtagctgagttttttaaaagtaaccaaacaacaacagataatttgagacaaacacttaaccagctgaagaatcaggtccactcagctgttgaagaaatggatggattagatgatgttgaaaacagcatgttgtactataatcaagcagtcattctttatcatctgcggcagtatacagaagccatatcagttggtgaaaaactttatcagttcatagagccttttgaagaaaaatttgcccaagcagtgtgttttttgcttgtagacctgtatatattaacctaccaagctgagaaagctttgcatcttcttgctgtcctagaaaaaatgatttcacagggtaacaataacaaaaatggaaagaatgagactggtaataacaacaacaaagatggatctaatcataaagctgaaagtggagctctaatagaagctgcaaaatcaaagatacatcagtacaaagtacgagcttatatccaaatgaagtctctgaaagcatgtaaaagggaaatcaagtcagtcatgaatacagctggaaattccgcaccctctctctttcttaaaagcaattttgagtacttaagaggtaattatcgaaaagccgtgaagctattaaatagttcaaacattgctgagcatccaggattcatgaaaacaggtgaatgcttgagatgcatgttctggaataaccttggttgcatccattttgccatgagcaagcacaatttgggaatattctactttaaaaaggctctgcaagagaatgacaatgtctgtgcacagctcagtgcaggtagcactgatccaggcaaaaaattttcaggaagacccatgtgtacgttactaaccaataagagatatgagttgctgtataactgtggaattcagcttcttcacattggaaggcctcttgctgccttcgaatgtctgattgaagctgttcaggtttatcatgcaaatcctcgcctctggctacggctggctgaatgctgcattgctgccaataaggggacttctgaacaagaaactaaaggccttcccagcaaaaaaggaattgtacagtctattgttggtcaaggctatcatcgtaaaatagttttggcatcacagtctatacagaatactgtttataatgatgggcagtcttcggccattcctgtagccagtatggagtttgcagccatatgtctcagaaatgccttgttgctgctacctgaagaacagcaagatccaaagcaggaaaatggggctaaaaatagtaatcaattaggtgggaacacagagagcagcgaaagcagtgaaacttgcagcagtaaaagccatgatggagataaattcattccagctccaccttcttctccattgagaaaacaggaattagaaaacttaaagtgctccatacttgcttgcagtgcctacgtggctctggctttgggtgataacctcatggctttgaatcatgcagataaacttcttcagcagcccaagctgtcaggatctcttaagtttttgggacatttatatgctgcagaagccctcatctctctcgacagaatatctgatgccattactcacttgaacccggagaatgtcactgatgtctccttagggatctcttcaaatgagcaggaccaaggatcagacaaaggtgaaaatgaagcaatggaatcctctggtaagcgggcccctcagtgctaccccagttccgtcaactctgccaggactgtgatgctgttcaaccttggcagcgcttactgcctgaggagcgaatatgacaaagcccgaaagtgtctccaccaggcggcttcaatgatccatcctaaagaggtgccccctgaggccatcttgctggcagtctaccttgaactgcagaatggtaatactcagctggccttacagatcatcaaaaggaatcagctgctccctgcagtgaaaacacactctgaagtgagaaagaagccagtgtttcagcctgtccacccgatccagcccatccaaatgccggctttcaccactgtgcagagaaagtgatacttcacttttggaaaactgttacctgagacccaggggagaatttactggccattttagttgtatcacagcagaatgaataaaagatggtgaaggctgttaattttgagtcaattctacccctgacttttggccaaaagcttacttaaaattaaggatttactaagtcatcatcagctgtttttcttaatttcagccagactattaattttgagccattatgtaatatatgccataggcaattaaaacat

SEQ ID NO: 2028 - DNA, 5501 bp, Homo sapiens
aagatggccgcggcgcgcacggctcctgcggcggggtagaggcggaggcggagtcgagtcactcccgcacttcggggctccggtgccccgcgccaggctgcagcttactgcccgccgcggccatgcggggctccgtgcacggatgagagaagccgctgccgcgctggtccctcctcccgcctttgccgtcacgcctgccgccgccatggaggagccgccgccaccgccgccgccgccaccaccgccaccggaacccgagaccgagtcagaacccgagtgctgcttggcggcgaggcaagagggcacattgggagattcagcttgcaagagtcctgaatctgatctagaagacttctccgatgaaacaaatacagagaatctttatggtacctctccccccagcacacctcgacagatgaaacgcatgtcaaccaaacatcagaggaataatgtggggaggccagccagtcggtctaatttgaaagaaaaaatgaatgcaccaaatcagcctccacataaagacactggaaaaacagtggagaatgtggaagaatacagctataagcaggagaaaaagatccgagcagctcttagaacaacagagcgtgatcataaaaaaaatgtacagtgctcattcatgttagactcagtgggtggatctttgccaaaaaaatcaattccagatgtggatctcaataagccttacctcagccttggctgtagcaatgctaagcttccagtatctgtgcccatgcctatagccagacctgcacgccagacttctaggactgactgtccagcagatcgtttaaagttttttgaaactttacgacttttgctaaagcttacctcagtctcaaagaaaaaagacagggagcaaagaggacaagaaaatacgtctggtttctggcttaaccgatctaacgaactgatctggttagagctacaagcctggcatgcaggacggacaattaacgaccaggacttctttttatatacagcccgtcaagccatcccagatattattaatgaaatccttactttcaaagtcgactatgggagcttcgcctttgttagagatagagctggttttaatggtacttcagtagaagggcagtgcaaagccactcctggaacaaagattgtaggttactcaacacatcatgagcatctccaacgccagagggtctcatttgagcaggtaaaacggataatggagctgctagagtacatagaagcactttatccatcattgcaggctcttcagaaggactatgaaaaatatgctgcaaaagacttccaggacagggtgcaggcactctgtttgtggttaaacatcacaaaagacttaaatcagaaattaaggattatgggcactgttttgggcatcaagaatttatcagacattggctggccagtgtttgaaatcccttcccctcgaccatccaaaggtaatgagccggagtatgagggtgatgacacagaaggagaattaaaggagttggaaagtagtacggatgagagtgaagaagaacaaatctctgatcctagggtaccggaaatcagacagcccatagataacagcttcgacatccagtcgcgggactgcatatccaagaagcttgagaggctcgaatctgaggatgattctcttggctggggagcaccagactggagcacagaagcaggctttagtagacattgtctgacttctatttatagaccatttgtagacaaagcactgaagcagatggggttaagaaagttaattttaagacttcacaagctaatggatggttccttgcaaagggcacgtatagcattggtaaagaacgatcgtccagtggagttttctgaatttccagatcccatgtggggttcagattatgtgcagttgtcaaggacaccaccttcatctgaggagaaatgcagtgctgtgtcgtgggaggagctgaaggccatggatttaccttcattcgaacctgccttcctagttctctgccgagtccttctgaatgtcatacatgagtgtctgaagttaagattggagcagagacctgctggagaaccatctctcttgagtattaagcagctggtgagagagtgtaaggaggtcctgaagggcggcctgctgatgaagcagtactaccagttcatgctgcaggaggttctggaggacttggagaagcccgactgcaacattgacgcttttgaagaggatctacataaaatgcttatggtgtattttgattacatgagaagctggatccaaatgctacagcaattacctcaagcatcgcatagtttaaaaaatctgttagaagaagaatggaatttcaccaaagaaataactcattacatacggggaggagaagcacaggccgggaagcttttctgtgacattgcaggaatgctgctgaaatctacaggaagttttttagaatttggcttacaggagagctgtgctgaattttggactagtgcggatgacagcagtgcttccgacgaaatcaggaggtctgttatagagatcagtcgagccctgaaggagctcttccatgaagccagagaaagggcttccaaagcacttggatttgctaaaatgttgagaaaggacctggaaatagcagcagaattcaggctttcagccccagttagagacctcctggatgttctgaaatcaaaacagtatgtcaaggtgcaaattcctgggttagaaaacttgcaaatgtttgttccagacactcttgctgaggagaagagtattattttgcagttactcaatgcagctgcaggaaaggactgttcaaaagattcagatgacgtactcatcgatgcctatctgcttctgaccaagcacggtgatcgagcccgtgattcagaggacagctggggcacctgggaggcacagcctgtcaaagtcgtgcctcaggtggagactgttgacaccctgagaagcatgcaggtggataatcttttactagttgtcatgcagtctgcgcatctcacaattcagagaaaagctttccagcagtccattgagggacttatgactctgtgccaggagcagacatccagtcagccggtcatcgccaaagctttgcagcagctgaagaatgatgcattggagctatgcaacaggataagcaatgccattgaccgcgtggaccacatgttcacatcagaatttgatgctgaggttgatgaatctgaatctgtcaccttgcaacagtactaccgagaagcaatgattcaggggtacaattttggatttgagtatcataaagaagttgttcgtttgatgtctggggagtttagacagaagataggagacaaatatataagctttgcccggaagtggatgaattatgtcctgactaaatgtgagagtggtagaggtacaagacccaggtgggcgactcaaggatttgattttctacaagcaattgaacctgcctttatttcagctttaccagaagatgacttcttgagtttacaagccttgatgaatgaatgcattggccatgtcataggaaaaccacacagtcctgttacaggtttgtaccttgccattcatcggaacagcccccgtcctatgaaggtacctcgatgccatagtgaccctcctaacccacacctcattatccccactccagagggattcagcactcggagcatgccttccgacgcgcggagccatggcagccctgctgctgctgctgctgctgctgctgctgctgttgctgccagtcggcccagcccctctggtggtgactctgtgctgcccaaatccatcagcagtgcccatgataccaggggttccagcgttcctgaaaatgatcgattggcttccatagctgctgaattgcagtttaggtccctgagtcgtcactcaagccccacggaggagcgagatgaaccagcatatccaagaggagattcaagtgggtccacaagaagaagttgggaacttcggacactaatcagccagagtaaagatactgcttctaaactaggacccatagaagctatccagaagtcagtccgattgtttgaagaaaagaggtaccgagaaatgaggagaaagaatatcattggtcaagtttgtgatacgcctaagtcctatgataatgttatgcacgttggcttgaggaaggtgaccttcaaatggcaaagaggaaacaaaattggagaaggccagtatgggaaggtgtacacctgcatcagcgtcgacaccggggagctgatggccatgaaagagattcgatttcaacctaatgaccataagactatcaaggaaactgcagacgaattgaaaatattcgaaggcatcaaacaccccaatctggttcggtattttggtgtggagctccatagagaagaaatgtacatcttcatggagtactgcgatgaggggactttagaagaggtgtcaaggctgggacttcaggaacatgtgattaggctgtattcaaagcagatcaccattgcgatcaacgtcctccatgagcatggcatagtccaccgtgacattaaaggtgccaatatcttccttacctcatctggattaatcaaactgggagattttggatgttcagtaaagctcaaaaacaatgcccagaccatgcctggtgaagtgaacagcaccctggggacagcagcatacatggcacctgaagtcatcactcgtgccaaaggagagggccatgggcgtgcggccgacatctggagtctggggtgtgttgtcatagagatggtgactggcaagaggccttggcatgagtatgagcacaactttcaaattatgtataaagtggggatgggacataagccaccaatccctgaaagattaagccctgaaggaaaggacttcctttctcactgccttgagagtgacccaaagatgagatggaccgccagccagctcctcgaccattcgtttgtcaaggtttgcacagatgaagaatgaagcctagtagaatatggacttggaaaattctcttaatcactactgtatgtaatatttacataaagactgtgctgagaagcagtataagcctttttaaccttccaagactgaagactgcacaggtgacaagcgtcacttctcctgctgctcctgtttgtctgatgtggcaaaaggccctctggagggctggtggccacgaggttaaagaagctgcatgttaagtgccattactactgtacacggaccatcgcctctgtctcctccgtgtctcgcgcgactgagaaccgtgacatcagcgtagtgttttgacctttctaggttcaaaagaagttgtagtgttatcaggcgtcccataccttgtttttaatctcctgtttgttgagtgcactgactgtgaaacctttaccttttttgttgttgttggcaagctgcaggtttgtaatgcaaaaggctgattactgaaatttaagaaaaaggttcttttttcaataaatggtttattttaggaaagctcaaaaaaaaaaaaaaaaaa

SEQ ID NO: 2029 - DNA, 1835 bp, Homo sapiens
ctcgctgcgccaccgcctcccgccacccctgcccgcccgacagcgccgccgcctgccccgccatgggtcgacagaaggagctggtgtcccgctgcggggagatgctccacatccgctaccggctgctccgacaggcgctggccgagtgcctggggaccctcatcctggtgatgtttggctgtggctccgtggcccaggttgtgctcagccggggcacccacggtggtttcctcaccatcaacctggcctttggctttgctgtcactctgggcatcctcatcgctggccaggtctctggggcccacctgaaccctgccgtgacctttgccatgtgcttcctggctcgtgagccctggatcaagctgcccatctacaccctggcacagacgctgggagccttcttgggtgctggaatagtttttgggctgtattatgatgcaatctggcacttcgccgacaaccagctttttgtttcgggccccaatggcacagccggcatctttgctacctacccctctggacacttggatatgatcaatggcttctttgaccagttcataggcacagcctcccttatcgtgtgtgtgctggccattgttgacccctacaacaaccccgtcccccgaggcctggaggccttcaccgtgggcctggtggtcctggtcattggcacctccatgggcttcaactccggctatgccgtcaaccctgcccgggactttggcccccgcctttttacagcccttgcgggctggggctctgcagtcttcacgaccggccagcattggtggtgggtgcccatcgtgtccccactcctgggctccattgcgggtgtcttcgtgtaccagctgatgatcggctgccacctggagcagcccccaccctccaacgaggaagagaatgtgaagctggcccatgtgaagcacaaggagcagatctgagtgggcaggggccatctccccactccgctgccctggccttgagcatccactgactgtccaagggccactcccaagaagcccccttcacgatccaccctttcaggctaaggagctccctatctaccctcaccccacgagacagccccttcaggatttccactggaccttgcccaaatagcaccttaggccactgcccctaagctggggtggaaccggaatttgggtcaatacatccttttgtctcccaagggaagagaatgggcagcaggtatgtgtgtgtgtgcatgtgtgtgcatgtgtgtgcatgtgtgtgcaggggtgtgtgtgtgtggggggggttcccagatattcagggcaagggaccagtcggaagggattctggctattgggggagcccagagacaggggaaggcagcctgtccatctgtgcataaggagaggaaagttccagggtgtgtatgtttcaggggcttcacatggaggagctgcagatagatatgtgtttctgtgtatgtgtatgtctgcctttttttctaagtgggggcttctacaggcttttgggaagtagggtggatgtgggtagggctgggaggagggggccacagcttaggtttggagctctggatgtacatacataagtaggagcagtgggacgtgtttctgtcataatgcaggcatgaagggtggagtgaagtcaggtcataagtttcatgtttgcttttgttttgttttgtttttaatgtatgtagcagatgttacagtcttagggatccgggatgggagaccccactttagaaagggtcgtcactcctttaatcctctactcaacaatgtactcttttacttttatattaaaaaaaataaaataaatatgtgcctaaaaaaaaaaaaaaa

SEQ ID NO: 2030 - DNA, 6463 bp, Homo sapiens
ctctcttgctcgctcgctccctctctctcctgctggctgcctgttctaggaagccagcgcggagaggggggggatgcacagcacaggggagagagattgcgcatgttggtcagtcgtgttttaaagagtacagtgcggggaggctgagaggggcgcatgcaacaacaacttttggaaggatggaagagaagaggcgaaaatactccatcagcagtgacaactctgacaccactgacagtcatgcgacatctacatccgcatcaagatgctccaaactgcccagcagcaccaagtcgggctggccccgacagaacgaaaagaagccctccgaggttttccggacagacttgatcacagccatgaagatcccggactcataccagctcagcccggatgactactacatcctggcagacccatggcgacaggaatgggagaaaggtgtgcaggtgcctgccggggcagaggccatcccagagcccgtggtgaggatcctcccaccactggaaggcccccctgcccaggcatccccgagcagcaccatgcttggtgagggctcccagcctgattggccagggggcagccgctatgacttggacgagattgatgcctactggctggagctcatcaactcggagcttaaggagatggagaggccggagctggacgagctgacattagagcgtgtgctggaggagctggagaccctgtgccaccagaatatggccagggccattgagacgcaggaggggctgggcatcgagtacgacgaggatgttgtctgcgacgtgtgtcgctctcctgagggcgaggatggcaacgagatggtcttctgtgacaagtgcaacgtctgtgtgcatcaggcatgctacgggatcctcaaggtgcccacgggcagctggctgtgccggacgtgtgccctgggtgtccagccaaagtgcctgctctgccccaagcgaggaggagccttgaagcccactagaagtgggaccaagtgggtgcatgtcagctgtgccctatggattcctgaggtcagcatcggctgcccagagaagatggagcccatcaccaagatctcgcatatcccagccagccgctgggctctgtcctgcagcctctgcaaggaatgcacaggcacctgcatccagtgttccatgccttcctgcgtcacagcgttccatgtcacatgcgcctttgaccacggcctggaaatgcggactatattagcagacaacgatgaggtcaagttcaagtcattctgccaggagcacagtgacgggggcccacgtaatgagcccacatctgagcccacggaacccagccaggctggcgaggacctggaaaaggtgaccctgcgcaagcagcggctgcagcagctagaggaggacttctacgagctggtggagccggctgaggtggctgagcggctggacctggctgaggcactggtcgacttcatctaccagtactggaagctgaagaggaaagccaatgccaaccagccgctgctgacccccaagaccgacgaggtggacaacctggcccagcaggagcaggacgtcctctaccgccgcctgaagctcttcacccatctgcggcaggacctagagagggttagaaatctgtgctacatggtgacaaggcgcgagagaacgaaacacgccatctgcaaactccaggagcagatattccacctgcagatgaaacttattgaacaggatctgtgtcgaggcctgtccacctcattccccatcgatggcaccttcttcaacagctggctggcacagtcggtgcagatcacagcagagaacatggccatgagcgagtggccactgaacaatgggcaccgcgaggaccctgctccagggctgctgtcagaggaactgctgcaggacgaggagacactgctcagcttcatgcgggacccctcgctgcgacctggtgaccctgctaggaaggcccgaggccgcacccgcctgcctgccaagaagaaaccaccaccaccaccaccgcaggacgggcctggttcacggacgactccagacaaagcccccaagaagacctggggccaggatgcaggcagtggcaaggggggtcaagggccacctaccaggaagccaccacgtcggacatcttctcacttgccgtccagccctgcagccggggactgtcccatcctagccacccctgaaagccccccgccactggcccctgagaccccggacgaggcagcctcagtagctgctgactcagatgtccaagtgcctggccctgcagcaagccctaagcctttgggccggctccggccaccccgcgagagcaaggtaacccggagattgccgggtgccaggcctgatgctgggatgggaccaccttcagctgtggctgagaggcccaaggtcagcctgcattttgacactgagactgatggctacttctctgatggggagatgagcgactcagatgtagaggccgaggacggtggggtgcagcggggtccccgggaggcaggggcagaggaggtggtccgcatgggcgtactggcctcctaactcacccccttccctgtcccaggccctgccctggtccccccacaaggcctcagcccagtcacaactgccatttccagtctctgctgagtgtcccagaccctcgaggctgccactccgtcgtggttttatttttaatatagagagagttttgaattctacactgttgtctttcctctgtgctggcctaggacattaggattccttccacggctccggccgctaggaccctgccaggtcccgcgcaccatccctgccctgcccacgtggtattgctgggctcctggctagatgcaagcaaggtggacaagagctcaggactccagcccactgccactgggtgacacagactgtcgtttgggcattatttcatggcagatgggccagtccagggcctaccccgccttgcccccagatcccactggggtccatttggggggtcctgctacactccaccgatccccaaggaagtataataaacgatacccagccagagtctactcactgtcacaagcacaacgagtttatatgagaaagcactgagggggtgcagagggcccgctagttccaggggaactgaaagctgttcctgatcagcccgtatcatctgaggcctgcctgcccaccctgccaccctcccctcccttgctgctctgcccctgccagtgcccagcccagcggctctgggaaggggttcccagaatccctcctgagctgtgccatttactcaggggactcccaaacagccagctgccagtgcaggtggagggctgtaggggagggccagtgcccagacagggtcatggggctcagaccagcccactgtagagaatcactctgaggctccaacttccttccttccttcggggccagtctcggccgaagtctggtcacgctcagacagagctgaccagaccagaccgtttgccttttcaagtttcctagtcctgctacaagatgagcttcttccgtggtttccttttggaaactcctccttccaacaagcagtgggatcccggggcccagggcgggccggtgttggccgctggggctgttgtaagtcttgctggatgttcccctgttcctgagccttaacccctcgcacagccatccccccccccgtcctgccatccccccccgccgtcctgccttccccaccccacccttaggtcccaggtagttgctctgaagagtttcagtagagtggccccagggtgatagctcagggaacaacaaaaaaggaattccgtgaaaacatttttttttctttgatgaattactcctgggtcacttccaccactggtaaagccagaacttctccaaaaagaaccttgcaaaaagtccagtgaatcagtcgaatcattctgtggatgccaaagaatattttgaccataatacagcacagcctggacctgacaacttgtcatttggacttttttttaaatggagttctttagcaacaaagtatagaaacatgttcattgcacacacccaaggagaagagctcaagcgcttggaagaggatgctttgctgctgctgaagtgtacctgggtgttagatttcagatcctgggctgagcccactgtgagctttcctaaactgtgagactcacagaggggaaagatactgacggtgaaaccagcatggaaaacgtctttaccatgtggttccctcctccccaaatacataaagcaaataagcaggatggggaacagcttgaccttcatccacccctaactccaaaactatcaaggtacgacagtggcattgtcatcgacactcaatttcatgtgaattttagcaaaacaggaaacaaagataatgactcagttcagaggatcggacaaatgtgtctagtccgggtggactcggagggagtggggtgggcttcaaggattctgggcgttgggatggcatgagctaccctgtagagtttagtctgcctgcccgccttggtagtagtgaccagtcagtgtcagcatcagtgtcccaaccccagtctctgtttactgcctttgaacagaacttcttccttccccatgctttgggtcacctcgggctgcaaccctgtctgtgccagattgcccggtctgaccctgcaggaagcaaagaggtgagcttaaagaacaaccaaactctgccaggggtcccagaaagcccagggtccagcagtctcagcacttggccccttgccccttcacaccatcctggggcaggggctgggcctccctggtggcaggggtgggtggagaattagggagagggtgcaacgagtctggccccttgcctcgggctggctggtgttcttccaagagcctctgctcacattgttggcctctggattctggcccttcttcattggctgttgctttggactggactgttgctgagcctgtgtcctgcagaacccagatgtctgttaggctggctggctgctgcgaggggaggggggtggcctttcatttggggtgccctttcactcccaggccaagccctggagcaatcttcttcaggcagctgtctccacctccaggatgtccagcaggctgcaaggagaaggatgccagccacccatcctcccccagttcccagcctttcccctgttggtcacagccgcttctgtctttttccggtctactgtccccagtgtagagggctttgctgtccctgagactgaggcaggttccttttccaggtcagaggtggaggtagatctttctctcaaccacatctgcctccacacacagctcctccgcagggaaggagaagctgctctgtaactcattctggctatcgtcccccttctcactgacctgaccgcccaccacctccttccccctcatcacatgacaaaggataatgtgcaagaaaagtatttttatgtatcataaatgtattttgaaacaaatgagaagaagaaaggtagaagggtttattttattaaatgagcctgacttagtgacagtgtgtgagcatttgcaatgtaagggcctcagcttccttggagaagccaccccaggtttccagacatagatgttgaattgtttgtggggggtgtgccaggccacgtctcgtgtgtccgtatgcaggcatgcctgtgtatactgtgtatgggcacactgggactagctgggacaattcctagagattcaactgcccaattctaaccaacattggcagcggctgaacttggcatttccttgctaactgccagatgtggccaacctttgtccatatgcaaaccactgaaaaatgatctggatttctatagcaaggcccttggggagggcactctcccatgcccttggcctcgctggccacattggccaatgagccagggctggagtctgagacctttggttgttctttaaggcacctcctgccactttctccctcagaggcacaaacactttgtgttccacgtcagtttgaggggacggtggggggatgatatgaatgtcacaggaggagacaccttctgtctttgtttcaaagaaagtgatgtgccatttgttaatatacaagagaaatattgaaaatatattgaaaagagcaattttaaattatttttggcttatgttgcaatatttattttcttgtattagaaaagattcctttgtagagaaaaaatgtatttttcattaacgcaaagacctatttctcctttttgtacattgtccatgtgcgcaacccttaacgagcaatagaatgtatggtcacctgggtgtggccagtgcccgctgtgccctgcatgattctgtgttgccgctgctgcatagttcccagccccatcctgtcctgctcactcatgggggcttccagaccccggccccaccagggcttgtgtcatagggagccctttgcactcctcgtgtgttggcaaacgcagttaataaagcagtgttttctgtgc

SEQ ID NO: 2031 - DNA, 7932 bp, Homo sapiens; identical to SEQ ID NO: 1266

SEQ ID NO: 2032 - DNA, 2100 bp, Homo sapiens
cggccccccgcattccccgcccccacctccccgccttgttgtccaacttctcccggagcagccggagagcaggcgtcgggacgcagcaaagagaggagagaccccagagtcagaaggagtgagaaccctgacccctaatcccactgcatccagccaataggagcccagccaccatggcggagctgcaggaggtgcagatcacagaggagaagccactgttgccaggacagacgcctgaggcggccaagactcactctgtggagacaccatacggctctgtcactttcactgtctatggcacccccaaacccaaacgcccagcgatccttacctaccacgatgtgggactcaactataaatcttgcttccagccactgtttcagttcgaggacatgcaggaaatcattcagaactttgtgcgggttcatgtggatgcccctggaatggaagagggagcccctgtgttccctttgggatatcagtacccatctctggaccagcttgcagacatgatcccttgcgtcctgcagtacctaaatttctctacaataattggagttggtgttggagctggagcctacatcctggcgagatatgctcttaaccacccggacactgttgaaggtcttgtcctcatcaacattgatcccaatgccaagggttggatggattgggcagcccacaagctaacaggcctcacctcttccattccggagatgatccttggacatcttttcagccaggaagagctctctggaaattctgagttgatacaaaagtacagaaatatcattacacatgcacccaacctggataacattgaattgtactggaacagctacaacaaccgccgagacctgaactttgagcgtggaggtgatatcaccctcaggtgtcctgtgatgctggtggtaggagaccaagcacctcatgaagatgcagtggtggaatgtaactcaaaactggaccccacccagacctcgttcctcaagatggctgactccggaggtcagccccagctgactcagccaggcaagctgaccgaggccttcaagtacttcctgcaaggcatgggctacatggcctcatcctgcatgactcgcctgtcccggtctcgtacagcctctctgaccagtgcagcatccgttgatggcaaccggtcccgctctcgcaccctgtcccagagcagcgagtctggaactctttcttcggggcccccggggcacaccatggaggtctcctgttgaatggcccttgttgccctagagtgggacccagccctcacctcccccagagctaacctgggaggtgctgaaggggcattgggccaccgtaagcaagggaaaaagggcagatcatgcggggagatgaccttgatctttgattgctaccctaaccttgacctttaacccgtgattccccccagctcctggaagagatgtcctaatatctcttagggacccagacccctaaattctcctcctcccccattttgatgttaaggtggagagggcatatgcatcctctgtcctgatctaggtgtctatagctgaggggtaagaggttgttgtagttgtcctggtgcctccatcagactctccctacttgtcccatatttgcaaggggaggggatttggggctggggctccattcaccaaagctgaggtggcttctcattaaccctttaggactctgaagggtatggacctacgtgaatgtgtgtcagggggagacttgctggtgggttagtggtcctcaggatgtgatagaaacatccagtgtaaaaaggaagttggaatgggagttggcgggcagtgaacgagtgtggggaaggattggtgctggggcaacaggaaggggcctggggccgtttggctgcactaactttggtagctcagtgtgcatctagagtgggactggggagggagctaagcttgggctgggctgcttggggcttggcatagggtggaaagggctaccctggggctctgaccacactgtagtatgtgtggagggtgccctcccgtctcccacaacttctgctataacaataaactgtagaggaatctgagtaccgttaaaaaaaaaaaaaaaaaaaaa

SEQ ID NO: 2033 - DNA, 480 bp, Homo sapiens
agcgctgggctaggggcgcggcttgaactcgcctaaagagctgcgccctctcatctcgcgcctgcagcccgtgccgccccagccgctgccgcctgcaccggacccggagccgtcatgcccaagtgtcccaagtgcaacaaggaggtgtacttcgccgagagggtgacctctctgggcaaggactggcatcggccctgcctgaagtgcgagaaatgtgggaagacgctgacctctgggggccacgctgagcacgaaggcaaaccctactgcaaccacccctgctacgcagccatgtttgggcctaaaggctttgggcggggcggagccgagagccacactttcaagtaaaccaggtggtggagaccccatccttggctgcttgcagggccactgtccaggcaaatgccaggccttgtccccagatgcccagggctcccttgttgcccctaatgctctcagtaaacctgaacacttggaaaa

SEQ ID NO: 2034 - DNA, 2579 bp, Homo sapiens
agcaaatcgcattgcgcagacgaccagcgggcgcctcggattccgcccccgggatggccccgcctcctcccgccccgcggcaaggcacgcacagggcagtgcgcgggtgggtgggtcctagcagcgcggcctgacgggaccaaggcggcgggagtctgcggtcgttccctcggctgtggaccgggcggcacgcacgcggtgcagggtaacatggcggatgcggaagtaattattttgccaaagaaacataagaagaaaaaggagcggaagtcattgccagaagaagatgtagccgaaatacaacacgctgaagaatttcttatcaaacctgaatccaaagttgctaagttggacacgtctcagtggccccttttgctaaagaattttgataagctgaatgtaaggacaacacactatacacctcttgcatgtggttcaaatcctctgaagagagagattggggactatatcaggacaggtttcattaatcttgacaagccctctaacccctcttcccatgaggtggtagcctggattcgacggatacttcgggtggagaagacagggcacagtggtactctggatcccaaggtgactggttgtttaatcgtgtgcatagaacgagccactcgcttggtgaagtcacaacagagtgcaggcaaagagtatgtggggattgtccggctgcacaatgctattgaaggggggacccagctttctagggccctagaaactctgacaggtgccttattccagcgacccccacttattgctgcagtaaagaggcagctccgagtgaggaccatctacgagagcaaaatgattgaatacgatcctgaaagaagattaggaatcttttgggtgagttgtgaggctggcacctacattcggacattatgtgtgcaccttggtttgttattgggagttggtggtcagatgcaggagcttcggagggttcgttctggagtcatgagtgaaaaggaccacatggtgacaatgcatgatgtgcttgatgctcagtggctgtatgataaccacaaggatgagagttacctgcggcgagttgtttaccctttggaaaagctgttgacatctcataaacggctggttatgaaagacagtgcagtaaatgccatctgctatggggccaagattatgcttccaggtgttcttcgatatgaggacggcattgaggtcaatcaggagattgtggttatcaccaccaaaggagaagcaatctgcatggctattgcattaatgaccacagcggtcatctctacctgcgaccatggtatagtagccaagatcaagagagtgatcatggagagagacacttaccctcggaagtggggtttaggtccaaaggcaagtcagaagaagctgatgatcaagcagggccttctggacaagcatgggaagcccacagacagcacacctgccacctggaagcaggatgagtctgccaaaaaagaggtggttgctgaagtggtaaaagccccgcaggtagttgccgaagcagcaaaaactgcgaagcggaagcgagagagtgagagtgaaagtgacgagactcctccagcagctcctcagttgatcaagaaggaaaagaagaagagtaagaaggacaagaaggccaaagctggtctggagagcggggccgagcctggagatggggacagtgataccaccaagaagaagaagaagaagaagaaagcaaaagaggtagaattggtttctgagtagtgaaggccacttgaagctggaggagaaactaaagccttattgagaaaacatgttatagatccttttgttgctgagagagtggaacataggtcctagacagggtgaagagttctggcacattttagctgctactttgagacctcggtgatgttacctggtgtggtcatcccatcttgtcctgttttaaggatatgggtggtgaaagatgaaagaggcagagtttatcccaatgacttctctgtttgagttgggaagcctcaccttcagacccagtaactgtccgcagctgtctgctagtggttgtcttaacatcgtagtcctagtttgcattttttaaatcccctctgtttaaaaggtttgtaaaacaaaaacaaaaaactaagtctgctcagtgaaatgctgtagaaccctaaataagtggtagaagagtgtcactgaattttgtctctgaattcagtataactgagttttgtccatgctggtgtctgggttataggcctgatgggcctggtagttttccatcttgttctggcctagaggtcagtcctttgcacttcctcaaagcttgtgtacagtgctcacctaaatccatctgactacttgttcctgtgccctcttgttttaggcctcgtttacttttaaaaaatgaaattgttcattgctgggagaagaatgttgtaatttttacttattaaagtcaacttgttaagttttttatgtattcctgttgggttttcttgttgatctcatgctagcagagcaaaaattgtaaaatattttgattaaaaatctagggacctttatgtcctatttgaaatgtgaaaaaaaaaaaaaaaaaa

SEQ ID NO: 2035 - DNA, 2099 bp, Homo sapiens
gcgtctgcgtagttcgctcacctccctttctaactccgctgccgccatggctcctgtgaaaaagcttgtggtgaaggggggcaaaaaaaagaagcaagttctgaagttcactcttgattgcacccaccctgtagaagatggaatcatggatgctgccaattttgagcagtttttgcaagaaaggatcaaagtgaacggaaaagctgggaaccttggtggaggggtggtgaccatcgaaaggagcaagagcaagatcaccgtgacatccgaggtgcctttctccaaaaggtatttgaaatatctcaccaaaaaatatttgaagaagaataatctacgtgactggttgcgcgtagttgctaacagcaaagagagttacgaattacgttacttccagattaaccaggacgaagaagaggaggaagacgaggattaaatttcatttatctggaaaattttgtatgagttcttgaataaaacttgggaaccaaaatggtggtttatccttgtatctctgcagtgtggattgaacagaaaattggaaatcatagtcaaagggcttcccttggttcgccactcatttatttgtaacttgacttctttttttttctgcttaaaaatttcaattctcgtggtaataccagagtagaaggagagggtgactttaccgaactgacagccattggggaggcagatgcgggtgtggaggtgtgggctgaaggtagtgactgtttgattttaaaaagtgtgactgtcagttgtatctgttgcttttctcaatgattcagggatacaaatgggcttctctcattcattaaaagaaaacgcgacatctttctaagattctctgtgggaaaatgactgtcaataaaatgcgggtttctgggccattcgtcttactttcattttttgattacaaatttctcttgacgcacacaattatgtctgctaatcctcttcttcctagagagagaaactgtgctccttcagtgttgctgccataaaggggtttggggaatcgattgtaaaagtcccaggttctaaattaactaaatgtgtacagaaatgaacgtgtaagtaatgtttctacaggtctttgcaacaaactgtcactttcgtctccagcagagggagctgtaggaatagtgcttccagatgtggtctcccgtgtggggcccagcaatgggggcccctgatgccaagagctctggaggttcttgaaagaggggacacgaaggaggagtgactgggaagcctcccatgccaaggaggtgggaggtgccctggaaatagctgcctcatgccacttaggccatgactggatttaatgtcagtggtgtgccacagtgcagaggctagacaactgaaaggggctaccaaggctgggaaaaaaatgcaattgttgctgtgagtgactttgaaagactctggtgccttgtggtgcccttctgaaattcaaacagtaatgcaaaagtgtctgcattagaatttacggtgtctaaaattcatgtttttaaaagagcttgcctacagatggtttccacacttgaaattgtgccctgcgagttgcatagctggaagttcaatgctcagtcctaccttggctcccattaaacatttggtgctctgtggattgagttgaacgtgttgaggctttgcaatttcacttgtgttaaaggctctggcatttttccatttctatgcaaatttctttgaagcagaattgcttgcatatttcttctctgccgtcacagaaagcagagtttctttcaaacttcactgaggcatcagttgctctttggcaatgtcccttaaccatgattattaactaagtttgtggcttgagtttacaaattctacttgttgcattgatgttcccatgtagtaagtcatttttagtttggttgtgaaaaaaccctgggctgaagttggcatttcagttaaaagaaaaaaagaaactagtcccagatttgaaaacttgtaataaaattgaaactcactggttttctatgtctttttgaactcttgtaatcgagttttgatcatattttctattaaagtggctaacacctggctactcttactgtaaaaaaaaaaaaaaa

SEQ ID NO: 2036 - DNA, 1581 bp, Homo sapiens; identical to SEQ ID NO: 646

SEQ ID NO: 2037 - DNA, 2354 bp, Homo sapiens
gtgacacgagggagcgcgaagcggagggcgcctcgcggcaggagcgggatttccggggtcacgggaaccggcaggggaacgggataaagttcccggagaaaggaaaggagagcgtgggatagtaaaagagaagacgcggagaagaggagaggacctacaagaacggaggacaggggcgcacgatggtcccggggggagcggaaacaaaggcacgcaaaacggaaaagcgtgtgtaggggagcggaaaaggaagtcaccaccgtggcctgcgacgaaatggcgaaaagtcttttgaagacagcctctctgtctggaaggacaaaattgctacatcaaacaggattgtcactttatagtacatcccatggattttatgaggaagaagtgaaaaaaacacttcagcagtttcctggtggatccattgaccttcagaaggaagacaatggcattggcattcttactctgaacaatccaagtagaatgaatgccttttcaggtgttatgatgctacaacttctggaaaaagtaattgaattggaaaattggacagaggggaaaggcctcattgtccgtggggcaaaaaatactttctcttcaggatctgatctgaatgctgtgaaatcactaggaactccagaggatggaatggccgtatgcatgttcatgcaaaacaccttaacaagatttatgagacttcctttaataagtgttgcgctggttcaaggttgggcattgggtggaggagcagaatttactacagcatgtgatttcaggttaatgactccagagagtaagatcagattcgtccacaaagagatgggcataataccaagctggggtggcaccacccggctagttgaaataatcggaagtagacaagctctcaaagtgttgagtggggcccttaaactggattcaaaaaatgctctaaacataggaatggttgaagaggtcttgcagtcttcagatgaaactaaatctctagaagaggcacaagaatggctaaagcaattcatccaagggccaccggaagtaattagagctttgaaaaaatctgtttgttcaggcagagagctatatttggaggaagcattacagaacgaaagagatcttttaggaacagtttggggtgggcctgcaaatttagaggctattgctaagaaaggaaaatttaataaataattggtttttcgtgtggatgtactccaagtaaagctccagtgactaatatgtataaatgttaaatgatattaaatatgaacatcagaattactttgaaggctactattaatatgcagacttacttttaatcatttgaatatctgaactcatttacctcatttcttgccaattactcacttgggtatttactgcgtaatctggaacatttagctaaaatatacacttttggcttaaaaattattgctgtcaattccaataataattcttagcttataaccaaagagcagtgtttaaaaggagagcttctatacaaaacctattcctggcgttacttttcatacaatttttgttctgttttacctggaaataatttaccaaaataactgagtgttgctgctaaagaacaaaagtggggaggtatcagggaacaagaaaacaagaaagggtatgatcaatcattttcttctgctccaaacagctggagtaaaattcatgggaaatggcccttcatttaaaaaaagatgtacctcactacccactacaaatttggaactttgttcttttcaataattagttttctattgtaaattacctactaaacagtggtagccatgacatggaaagtcaactgattctacaattggacattcatttgtgtgccctggaatttccaactagtaataaacaactactgttgatgtagttttaaaccacttgaagggactcatgaagcatcctgcaacataaatttgcatttttacatcagatttcttttttttcctgaaaaacaactaaccttctaacaactatctttcaaaagtaaatgtaataaaaatgcacaacataaaatgtttatgatcccagcaatacactttttaaaaaatgtgaaagtcaaagaattaagttctagttctgactcatcacaagaggtcaaaagtatttgctactgtaacattcaattcacatttgagaatcatggtaaaaataacttgcatttgccttaccatcatgatcctactgttgagttaggaaaatatggttagacagactcacattactttttttcagaggtaaactctagattactgtgtcaacccaatactatttggccatagatgtaaaaactaccaaataaaagtggattttgtggtctacaaaaaaaaaaaaaaaaa

SEQ ID NO: 2038 - DNA, 3843 bp, Homo sapiens
gaggaaggtcccttctcgctcgccatctctgcgactttaatgcgcttgcgcacgtgctgtctaccagttcctgagagggacgcgtgccgcggagccaggcttactacgtgacccggacaccaggcatacgctaggggcagtcagctgtgccttctctttcggagttgttccgtgctcccacgtgcttccccttctccactggctgggatcccccgggctcggggcgcagtcaccggaagaaaagaatgcgacagctgcagaagaaaataaagaatggaacactgaacataaagcaggacgacccctttgaactcttcatagcagccacaaacattcgctactgctactacaacgagacccacaagatcctgggcaataccttcggcatgtgtgtgctgcaggattttgaagccttaactccaaacttgctggccaggactgtagaaacagtggaaggtggtgggctagtggtcatcctcctacggaccatgaactcactcaagcaattgtacacagtgactatggatgtgcattccaggtacagaactgaggcccatcaggatgtggtgggaagatttaatgaaaggtttattctgtctctggcctcttgtaagaagtgtctcgtcattgatgaccagctcaacatcctgcccatctcctcccacgttgccaccatggaggccctgcctccccagactccggatgagagtcttggtccttctgatctggagctgagggagttgaaggagagcttgcaggacacccagcctgtgggtgtgttggtggactgctgtaagactctagaccaggccaaagctgtcttgaaatttatcgagggcatctctgaaaagaccctgaggagtactgttgcactcacagctgctcgaggacggggaaaatctgcagccctgggattggcgattgctggggcggtggcatttgggtactccaatatctttgttacctccccaagccctgataacctccatactctgtttgaatttgtatttaaaggatttgatgctctgcaatatcaggaacatctggattatgagattatccagtctctaaatcctgaatttaacaaagcagtgatcagagtgaatgtatttcgagaacacaggcagactattcagtatatacatcctgcagatgctgtgaagctgggccaggctgaactagttgtgattgatgaagctgccgccatccccctccccttggtgaagagcctacttggcccctaccttgttttcatggcatccaccatcaatggctatgagggcactggccggtcactgtccctcaagctaattcagcagctccgtcaacagagcgcccagagccaggtcagcaccactgctgagaataagaccacgacgacagccagattggcatcagcgcggacactgcatgaggtttccctccaggagtcaatccgatacgcccctggggatgcagtggagaagtggctgaatgacttgctgtgcctggattgcctcaacatcactcggatagtctcaggctgccccttgcctgaagcttgtgaactgtactatgttaatagagataccctcttttgctaccacaaggcctctgaagttttcctccaacggcttatggccctctacgtggcttctcactacaagaactctcccaatgatctccagatgctctccgatgcacctgctcaccatctcttctgccttctgcctcctgtgccccccacccagaatgcccttccagaagtgcttgctgttatccaggtgtgccttgaaggggagatttctcgccagtccatcttgaacagtctgtctcgaggcaagaaggcttcaggggacctgattccatggacagtgtcagaacagttccaagatccagactttggtggtctgtctggtggaagggtcgttcgcattgctgttcacccagattatcaagggatgggctatggcagccgtgctctgcagctgctgcagatgtactatgaaggcaggtttccttgtctggaggaaaaggtccttgagacaccacaggaaattcacaccgtaagcagcgaggctgtcagcttgttggaagaggtcatcactccccggaaggacctgcctcctttactcctcaaattgaatgagaggcctgccgaacgcctggattacctgggtgtttcctatggcttgacccccaggctcctcaagttctggaaacgagctggatttgttcctgtttatctgagacagaccccgaatgacctgaccggagagcactcgtgcatcatgctgaagacgctcactgatgaggatgaggctgaccagggaggctggcttgcagccttctggaaagatttccgacggcggttcctagccttgctctcctaccagttcagtaccttctctccttccctggctctgaacatcattcagaacaggaacatggggaagccagcccagcctgccctgagccgggaggagctggaagcactcttcctcccctatgacctgaagcggctggagatgtattcacggaatatggtggactatcacctcatcatggacatgatcccggccatctctcgcatctatttcctgaaccagctgggggacctggccctgtctgcggctcagtcggctcttctcttggggattggcctgcagcataagtctgtggaccagctggaaaaggagattgagctgccctcgggccagttgatgggacttttcaaccggatcatccgcaaagttgtgaagctatttaatgaagttcaggaaaaggccattgaggagcagatggtggcagcgaaggatgtggtcatggagcccacgatgaagaccctcagtgacgacctagatgaagcagcaaaggaatttcaggagaaacacaagaaggaagtagggaagctgaagagcatggacctctctgaatacataatccgtggggacgatgaagagtggaatgaagttttgaacaaagctgggccgaacgcctcgatcatcagcctgaaaagtgacaagaaaaggaagttagaggccaaacaagaacccaaacagagcaagaagttgaagaacagagagacaaagaacaaaaaagatatgaaactgaagcggaagaaatagtgaagagaaactcgggcatctgtgtttgatcatgggaagatactctcactaactgaaccctctctggctggactgttaaaagcaacgagaggccccggcacacctggaagctggccgcgaattcggcctctgggcctgtgtgtctgtgagctcaacctggctaaaggcagagtcactcccaaatgggtctctttagaacttgatggctgggcactgccatctctagaattgccacgagtctctctcttcctgcccagtccagggccctcctttcctataagttcatattttgctttgagccagctttttagtctcattcccacacatgtggaagccacgttgcctctcgaccgcctgaggcccttaagtacatcgctttctggtggtgcccaggaggctgctgctgggccgctgggtctctctttgtggacttgtacctggagcaggaggaactccagtccgtcccggcatccatggcagcccgcggttaggtgcgccagggtttgctgatgttgtcttgtgctgttccactcttggctccagcagacccactgtcccagaaaagcctgatcctgtagtttatgtagaatgccacatctgcgtcctcaagacctgtttcatccatttgggaaaagatgttgggaaaggccactttgctcgcaggggtgaggggaaggatagagaatctatttttaataaataacattctagaaagatcaaaaaaaaaaaaaaaaaa

SEQ ID NO: 2039 - DNA, 5143 bp, Homo sapiens; identical to SEQ ID NO: 2021

SEQ ID NO: 2040 - DNA, 3399 bp, Homo sapiens
aaccccgcgcgctgattggccgcgtgggcgaggcggaggagagccgtgcgcagcggcgtatgtggggccgtgtgcagacccgcgtgtggcgcaggcaaggaccctcaaaataaacagcctctaccttgcgagccgtcttccccaggcctgcgtccgagtctccgccgctgcgggcccgctccgacgcggaagatctgactgcagccatgagcagcaatgagtgcttcaagtgtggacgatctggccactgggcccgggaatgtcctactggtggaggccgtggtcgtggaatgagaagccgtggcagaggtggttttacctcggatagaggtttccagtttgtttcctcgtctcttccagacatttgttatcgctgtggtgagtctggtcatcttgccaaggattgtgatcttcaggaggatgttgaagcctgctataactgcggtagaggtggccacattgccaaggactgcaaggagcccaagagagagcgagagcaatgctgctacaactgtggcaaaccaggccatctggctcgtgactgcgaccatgcagatgagcagaaatgctattcttgtggagaattcggacacattcaaaaagactgcaccaaagtgaagtgctataggtgtggtgaaactggtcatgtagccatcaactgcagcaagacaagtgaagtcaactgttaccgctgtggcgagtcagggcaccttgcacgggaatgcacaattgaggctacagcctaattattttcctttgtcgcccctcctttttctgattgatggttgtattattttctctgaatcctcttcactggccaaaggttggcagatagaggcaactcccaggccagtgagctttacttgccgtgtaaaaggaggaaaggggtggaaaaaaaccgactttctgcatttaactacaaaaaaagtttatgtttagtttggtagaggtgttatgtataatgctttgttaaagaaccccctttccgtgccactggtgaatagggattgatgaatgggaagagttgagtcagaccagtaagcccgtcctgggttccttgaacatgttcccatgtaggaggtaaaaccaattctggaagtgtctatgaacttccataaataactttaattttagtataatgatggtcttggattgtctgacctcagtagctattaaataacatcaagtaacatctgtatcaggccctacatagaacatacagttgagtgggagtaaacaaaaagataaacatgcgtgttaatggctgttcgagagaaatcggaataaaagcctaaacaggaacaacttcatcacagtgttgatgttggacacatagatggtgatggcaaaggtttagaacacattattttcaaagactaaatctaaaacccagagtaaacatcaatgctcagagttagcataatttggagctattcaggaattgcagagaaatgcattttcacagaaatcaagatgttatttttgtatactatatcacttagacaactgtgtttcatttgctgtaatcagtttttaaaagtcagatggaaagagcaactgaagtcctagaaaatagaaatgtaattttaaactattccaataaagctggaggaggaaggggagtttgactaaagttctttttgtttgtttcaaattttcattaatgtatatagtgcaaaataccatattaaagaggggaatgtggaggactgaaagctgacagtttggacttttctttttgtacttaagtcatgtcttcaataatgaaaattgctgttaaaaggatgtatgggatttagatacttttgcaaagctatagaaaattcactttgtaatctgttataataatgcccttgagttctgtgttcagtctgaacaggttttttggtggtggtggttttgttttgttttggagacggagtctcactcttgtcgcccaggctggagtgcaggcttggctcactgcaacctccacctcccgggttcaagcaattctcctgcctcagcctcctgagtagctgggattacaggcacccgccaccaccccccgctaattttttgtatttttatttttattttatttttttatttttttttgagacagagtgtcgctctgttgcccaggctggagtgtagtggtgcgatctcggctcactgcaagctccgcctcctgggttcgtgccattctcctgcctcagcctcctgagtagctggggctacaggtacccgccaccgcgcccagctaattttttttttttgtatttttagtaaagacggggtttcacggtgttagccaggatggtctcaatctcctgacctcgtgatccgcccgccttggcctcccaaagtgctgggatcacaggcgtgagccaccgcgcccggcctattttttgtatttttagtagagactgggtttcatcatgttggtcgggctggtctccaactcctgacctcaggtgatccacctgccccgccccccaaagtgctagtgttacaggtgcgagccaccgtgtctggccgattctgaacagttttaataccattgctatttttgtgtttttcctgggccttttttttttttttttttttttttgagacagtctcgctctgttgcccaggctagagtgcaatggtgcaatctcagctcactgcaacctccaccccccacccccacaccccgttcaagtaattctcctgcctcagcctcccaaatagctgggattacaggtgtccgccaccacacccagctaatttttgttatttttagtagagatggggtttcactgtgttggtcaggctggtctccaactgttgccctcaggtgagccactgtgccccaccttttcctgggtttcataaggatctgaagtggtggattccttgtttttgctagtgtctcatttagagttgagatggaccttaaaactcatctgttttaactcactttttaatagatgagttaaacttaatttacttaaggatgtacagttagagcctggaacttcaaccattattcactccccatgccctgtttccccccacttcgaaattaaatgcggttagcatcatatagttcattttccccctccatgctgctgtgtgattcttgactttgggtatgagtttttcatccttcatgcagggttctgtcagttcatggtatagtgattcagtgttaaaatggtggtgtctcagctgtgctgtgcacattccaaccttgtcaaattaatagtcctgagcaagcaagaaaaagaggtaataacatacccatttctttatgaatataagcttataatattttttcatgtgctatttttactgagcaaattgtatgtctcacatgttaacacaataaatatcttgacaattttattttctaccataaaaaaaaaaaaaaaa

SEQ ID NO: 2041 - DNA, 1427 bp, Homo sapiens
atctccttccgtcggtccgctcagaatcagctgtcctctcagactgtgtgggtggtttccccggccgcagctccgtacgggcttggattgctgggcctcggtgcaccccagcctcccccactcgggttctgagcttgagctggcggctctttaactctgcttcactgttgctcttggcaacatccacttccgggagcgagtgccgtttcccccgctcaccgcgggctagggagcgtgggattccggactgtgagcggctgttagtgcgtcgcagctgctggcgatccggcgaccctcggccggcaggacccgcgggccacgcagccggggccttctcaacgcctcagtacctcggcgggaccgccatggttctgctgcacgtgaagcggggcgacgagagccagttcctgctgcaggcgcctgggagtaccgagctggaggagctcacggtgcaggtggcccgggtctataatgggcggctcaaggtgcagcgcctctgctcagaaatggaagaattagccgaacatggcatatttctccctcctaatatgcaaggactgaccgatgatcagattgaagaattgaaattgaaggatgaatggggtgaaaaatgcgtacccagcggaggtgcagtgtttaaaaaggatgatattggacgaaggaatgggcaagctccaaatgagaagatgaagcaagtgttaaagaagactatagaagaagccaaagcaataatatctaagaaacaagtggaagccggtgtctgtgttaccatggagatggtgaaagatgccttggaccagcttcgaggcgcggtgatgattgtttaccccatggggttgccaccgtatgatcccatccgcatggagtttgaaaataaggaagacttgtcgggaacacaggcagggctcaacgtcattaaagaggcagaggcgcagctgtggtgggcagccaaggagctgagaagaacgaagaagctttcagactacgtggggaagaatgaaaaaaccaaaattatcgccaagattcagcaaaggggacagggagctccagcccgagagcctattattagcagtgaggagcagaagcagctgatgctgtactatcacagaagacaagaggagctcaagagattggaagaaaatgatgatgatgcctatttaaactcaccatgggcggataacactgctttgaaaagacattttcatggagtgaaagacataaagtggagaccaagatgaagttcaccagctgatgacacttccaaagagattagctcacctttctcctaggcaattataatttaaaaaaaaaaaaaaggccacttactgccctctgtaaaagatgttaacatttctagttttcttttagtgtgaatttttaaaatagcagttattcaaggttttagaacttaataaatacctagtcag

SEQ ID NO: 2042 - DNA, 2990 bp, Homo sapiens
gcttgtggcccgcgcaggggcggggtcggaaggtctaggccgggcgcggagcgaggaagcgggtggcgctgggacgcatgctctgggggagatgagtataatgacccgcgtttgtccgccgcccgtgccccgctcaatccccgcatcaatcccgcgaggccgtttctcccgttggctccactgtaccgggggctgaggcccagggaggtctcgcggctccctaggttatccagctagtaagaggcgaagctggaattctcactgtgggcccattccatggcttttgccagagcgccagggacacactcagttcaccttctagcagggaagacccaaagatgcgcgcccctggcagccagggcgtcggaccaggcaattcctactgtccagcatcacctcctccaggcctctcggatgcctctgttgggacagctaagttcctcttcaaagactcaatttcctggtcataagctgtaaacagattctactcccgctttttcttctttgtcgcacgtctaccctatttgggaaagtttaaaccttagccaatcgggatcagctcagattgtgcggtccaaccccccagccaatggggaaaggacacagaaacaggaactgcgttagggttaaaaaccacttccctcctttgttggcgggtgctcttgggattgcaaccagcgcaagcagcacccttctgcagaagtaaagatgccttgctgggaagtcttctgtctcagtgctggtttttcttgactacactgagcacttgttttcaacaaatttgagggtcttctgggatcccattctcctttgggaggggtagcgattacttttcctcgtgagacacgtcccactgccttgttgcagtggcccaaggagcggaggatcgggtccacccaaagtgaggaataaatccggactttcagcaacgtgggcaggaaggagccttaaaattcccaggcaagtgggtaactctgtgcacagaccaagccgccgacgggaccatcacaaaagctttacaaggccttaccaccctggcaaatgaattagccgaaaattctggactagataacccttttatgggtctcatggaaaagtggtttggaaaatggaaaggactcctggcttcaatctttacctctcttgcaattgtaacaagtgtacttatccttgtgggctgccgcatcataccttgtattcgtgggttaactcaaaggctcatagaaacagccctcactaaagccttcctctcttctctccctccatacttggacaagctcttgctcctggataatcaagaagaacaacgaagccaaatcctgttaaaattttttgcagaggaagaagtatcaaatagaagagaggaaattgttgggacagctaagctcttcaaagactcaacttcctggtcataaacttctccccgtttttcttctttttcgccagtctaccctgtttgggaaagtttaaaccttagccagtcgggatcagctcagattgtgcagtccatccccagtcaatggggaaaggacacagaaacaggaactgcgttagggttaaaaagcccttctctcctttgtttggggtgctcttgcgattacaagctgcgcaagtagcaccgttctgaagtaaagatgccttgctgggaaatctgtctcagtgctggtttttcttgactacactgagcacttgtttccaacacccctgtgctccaggctgggttaggtctgatctcagggaatgtctgtttcaacacgtgtctgcagttctttggcttgtgttgctcactgcagtgggcccagcctggtctagaggaggcgctcaggaagtatctgtgaaatgtgaatgtgtagttccttcagtgaatatggccctggggctgaagatggcagaagcattctgggagcttctggagaaggagacctgggaggagaaggttggaatggcgggggcagcagaggggctgggtgaactcagctgtcccacccaggcccatcctctgcagcccgagaaggaagctcacagggcaagacatggaagagatcaagttccctgcccggtgcctgggctgttgatggcctcaggaaaatggaaccattacctgttgctgtcaagtggctgggggccaggatgcctgggttggccgtgagaggacattgctgaggagagtggaggccaggctggggtggggtgtggcaggaggacaggaatgcagtggaaccagtgggtcaggctcctgagggccccaggctccagcctcagggctggcctgttccctcctaagctgccatcttcatatcttcaggacccacccctctactcctcaccctcagcacaacgatgtgatcgaaaggcaaatatttatttttcaggaagagaagcaggagacctcgaggcttctggacttaggaggtccgggcagctggtccatggttgtccaggtagtgccgcagggctgtgggataatccgttatgacgccagtggctcccacgctgaaggctgcttcaaaatccgactcttcattaaggcaccaaaagaccacctgagcagggagggagggggcctgtagattctgaacaattttacatctggagagtggggacccacctcctcctctatggagactccccagcagcagtaggctggagctgattgttaaattctcaggaattttgcaaagtggttattaaacccagccattattaaaaattaaatcatagcctgggtgcagtggctcacgcctgtaatatcaacactttgggacgccgaggcaggagttgaggccaggtgtttaagatcgagtgagacctcatctctacaaaaaactttgtaaaaattaattagcccggtgtggtggtatgcgcctgtgctcccagctacttggaagactgaggtgaaagaattgcttgagcccaggactctaaggctgcagtgagctatggttgcaccactgtactccagcctgggcgatacaacaagacctcgtctc

SEQ ID NO: 2043 - DNA, 2350 bp, Homo sapiens
gcggccgcaagccgtcgccccctttaagagcctgctccgcgggactaacgttcgaacgggccctggcgcccctcctcgggctccgattggccgtgcgcggcgcacgagggcgcgccggccagccccggaacggttggcggcccttcgtgattggcggtcgagaagcctatataaggcgcggggcagccaggctgccctgtttagcgaccggacccgaaacggggaagttgtcttgtttggagaggttagtagagcagcgcgcgcgtcaccagagtcgtttctcttcggagtcttaggtgatcgagggtgtgcccagggggcggacttgtttgcgcctcccgttccctcccaatttccaaacgtgtcaccccggcgccgacggccctgtgcaggggaagcagatggagttcaagctggaggctcatcgcatcgtcagcatctctctgggcaagatctacaactcgcgggtccagcgcggcggcatcaagctgcataagaacctcctggtctcgctggtgctgcgcagcgcccgccaagtctacctgagcgacccgtgccccggcctctacctggccggtcccgctgggaccccggcgccgccaccgcagcagcagcccggggagccggcggccgggccacccgccggctggggagagccgcccccgcccgccgctcgtgcctcttggccggagaccgagccgcagccggagcgctcctccgtctcagacgcgccgcgggtaggggacgaggtgccggtggccacggtgactggagtcggggacgtttttcagggcggagaggcggacgcgacggaagctgcctggagccgcgtggaggggccgcgccaggcggcggccagagaagccgagggtaccgccggaggctggggcgtcttccccgaggtatctcgtgccgcgcgccgcccctgcggctgccccctaggcggggaggacccgccgggtacaccggccgcgaccccccgcgctgcctgctgctgcgcgccgcaaccagcggaggacgagccccccgcgccgcccgcggtgtgccccaggaagcgctgcgcggcgggggtgggcggcggcccagcgggctgcccggcgcccggctcgaccccgctcaagaagccccgccggaacttagagcagccgccgagtggaggagaggacgacgacgcggaggagatggagaccgggaacgtggctaacctcatcagcatcttcggttccagtttctcgggactcctacggaaaagccccgggggcggcagagaggaagaggagggagaggagagcggtccggaagccgccgagcccgggcagatctgctgcgataagccggtgctgagagacatgaacccctggagcacagccatcgtggccttctgagcccttggcccccctgcggggaggaggtggagcagcgggcgtccccgaagtgagggccaggcccttcccggctgcgaggacgcccagagaccgcgggcgctgagcgcgttgggcagactggttgcctctgggcatcgcaaactgcccccgggcgcatctggcttatctggagacctgggagcttgaggctcattggaagaggacgatcgttaacttttgtgtttgtgtatgtctgtgtatgtaagtttgtcttgtggcattaagactattttgctcttctggaatgcaccactccttccccagggtttaagagattgggggcagacagggactttcctctgccggctgcgtggagaaggaagcggctaaaaggtttgggccggggagttccccattcgttctccggggagggagggactttacacctacccctcaccggaaagctagacccgcttcagggccaggagtggcgtttccgcacaggatttcctaagacgagagggatttagccaagagcacagacttggattccttctgtccctccccacctttctctcccaatgaagaaacgtttatatcctgtgattactctaggaaaggggcgtattaacggtcctttgcttccccgcaggggagaaaaagcttgacgaacttcacagaagagttcaagcttggaaataatggagtttatagagaaaagatatatttttaaaagctctaggtcagaagtactacacagtgcttttaaaaagtgtttaatgagagtttacagacagaagcccgaagtggaaagaccttatggttttgtagatatggtgactccagtctttgttgtataaaggttgggggagctgataaggtttttgtacagtattttctccttcgttgtattgatttttgtataaaaatgtaacttctacgtgtctaacacgtattaaatattttgaagcaacgtaaaaaaaaaa

SEQ ID NO: 2044 - DNA, 14361 bp, Homo sapiens
ctggcagtggctgcctttagggcggagccggctcccgctctcctcagtctgcggtgggctagcggacggtccggcttccggcggccgtttctgtctcttgctggctgtctcgctgagtcgcggccgccttctcatcgctcctggaaggtcccgagcgcgacaccatgtcggagcccgggggcggcggcggcgaggacggctcggccggattggaagtgtcggccgtgcagaatgtggcggacgtgtcggtgctgcagaagcacctgcgcaagctggtgccgctgctgctggaggacggcggcgaggcgccggccgcgctggaggcggcgctggaggagaagagcgccctggagcagatgcgcaagttcctttcggacccgcaggtccacacggtgctggtggagcgctccacgctcaaagaggacgtcggtgatgaaggagaagaagaaaaagaattcatttcctataacatcaacatagacattcattatggggttaaatccaatagcttggcattcattaaacgtactcccgtgattgatgcagataaacccgtgtcttctcagctccgggtccttacactcagtgaagactcgccctacgaaactttgcattctttcattagcaatgcagtggctcctttttttaagtcctacattagagagtctggcaaggcagacagggatggtgataaaatggctccttcagttgaaaagaagattgcagaactcgaaatgggactccttcacttgcagcaaaatattgaaattccggagatcagcctgccgattcatccaatgatcacaaatgttgcaaaacagtgttatgagcgtggagaaaagccaaaagttacagactttggtgataaggttgaagacccaacatttcttaatcagttacaatctggagttaaccgctggatccgagaaattcaaaaagtgaccaaactggatcgagatcctgcatcaggaactgccttacaggaaattagtttttggctaaacttggaacgtgcgttataccgcatccaggagaaacgggagagcccggaagttctcctgactctggatatcttgaaacatggcaagcgcttccatgccaccgtcagttttgacactgacacaggtctaaaacaggctttggaaactgtgaatgactacaatcctctgatgaaagatttccctctgaatgatttgctgtctgccacggagctggacaaaataagacaggcgcttgttgccattttcacacatttgagaaagatccgaaacacaaaatatcctattcagagggcactgcgtttggtggaggcaatttcaagagacttgagttctcaattactcaaagtattgggcactaggaaattgatgcatgttgcttatgaagaatttgaaaaagttatggtagcatgctttgaagtttttcagacttgggatgatgagtatgagaaacttcaggtattgttgagagacatcgtcaaaagaaaaagggaagaaaatctgaagatggtgtggcgtatcaaccctgcccacaggaagctgcaggcccgccttgaccagatgagaaaatttagacgccagcatgaacagctaagagctgttatcgtcagggtcctgaggccacaggtcacggcagttgcacaacagaatcaaggagaggtccctgaaccccaagatatgaaagtggctgaggttctctttgatgctgcagatgcaaatgccattgaggaagtaaaccttgcttatgagaacgtcaaggaagtggatggactggatgtttccaaagagggcacggaagcctgggaggctgctatgaagaggtacgatgagaggatcgacagagtggagacccggatcaccgctcgccttcgggatcagcttggcacagccaagaatgccaacgagatgtttaggattttctccaggtttaatgcactgtttgtcaggcctcacatccgtggggccattcgcgaataccagacccagctgatccagcgcgtgaaagatgacattgagtctcttcacgacaagttcaaggtccagtacccacagagtcaggcttgtaagatgagtcacgttcgtgacttgccccctgtgtcagggtctatcatctgggctaaacagatcgacaggcagctgacggcctacatgaagcgggtggaagatgtccttggcaagggctgggagaatcacgtggaggggcagaagctgaagcaggatggagacagcttccgcatgaagctcaacacgcaggagatctttgatgactgggcaaggaaggtgcagcagcgcaacctcggtgtctcggggcgcattttcaccatcgaaagtactcgggttcggggccgaactggaaatgtgcttaagctgaaagttaactttcttcctgagattatcacactatccaaagaagtccggaacctcaaatggcttggtttccgcgtcccactggcgattgtgaacaaagcccatcaagcaaaccagctttacccgtttgccatctcactgatcgagagcgttcgtacctatgaacggacctgcgagaaggtggaggagcggaacaccatttcccttttggtggctggcttgaaaaaggaagtgcaggccctgatcgcagaaggcattgcgttggtgtgggagtcctacaaacttgacccatatgtacagcgcttagcagagactgtcttcaacttccaagaaaaggtggatgatctgctgatcattgaagaaaaaatagacctagaagtccgttccttggaaacttgtatgtatgaccataagacattctcggaaatcttgaacagagtccagaaagcagtggatgacttaaatctgcactcctattccaatttgcccatctgggtcaacaagcttgacatggagattgaaagaatattgggcgtccgtctgcaagctggcctgagagcttggacgcaggttcttcttggacaagctgaagataaagcagaagttgacatggacacagatgctccacaagttagtcacaagcctggtggagagccaaagatcaaaaatgtcgttcatgagctaagaataaccaatcaggtaatctacttgaatccaccaattgaagagtgcagatacaagctgtatcaggaaatgtttgcctggaagatggttgtactgtctctccccaggatccagagtcagaggtaccaggtgggtgtacattacgaattgactgaggaagagaaattctatcggaatgctttaacacggatgcctgatggccctgttgccctggaagagtcgtattctgctgtcatgggcattgtatctgaagttgaacagtatgtcaaggtttggcttcagtatcagtgtttatgggatatgcaagctgaaaacatctataacagacttggagaagatctcaacaaatggcaggctctcctggtccaaataaggaaggccagaggaacctttgacaatgcagaaaccaagaaagagtttggaccagtagttatagattatggcaaggtacaatctaaggtgaacttgaaatatgactcttggcataaggaggttcttagcaaatttgggcagatgctaggatcaaacatgacggaattccattcccagatctcaaagtcccgccaagagttggagcagcactcagtagacacggccagcacctccgatgcagtgaccttcatcacctatgtgcagtctttgaaacggaagatcaagcagtttgagaagcaagttgagctctaccgcaatggccagcgcttactggaaaagcaaaggttccagttcccaccttcctggctttatattgacaacatcgagggagagtggggagccttcaatgacatcatgcggcgaaaggactctgccattcagcagcaggtggcaaacctgcaaatgaagattgtccaggaggatcgggccgtggaaagccgcaccaccgacctgctgactgactgggagaagaccaagcctgtcacgggcaaccttcgcccagaagaggcacttcaggctctcaccatatatgaggggaagtttggtaggctgaaggacgacagagagaagtgtgcaaaggccaaggaggcgctggaattgacagatactgggcttctcagtggcagtgaagagcgcgtgcaggtggccttagaagaattacaggacctcaaaggcgtttggtcagaactttctaaggtttgggagcaaatcgatcagatgaaggagcaaccctgggtttcagtacagcctcgaaagcttcgacaaaatttggatgccctcctgaaccagctgaaaagcttccctgcccggttgcgacagtatgcgtcctatgagtttgttcagaggcttctgaaaggttacatgaagataaatatgctggtgattgaactgaaatccgaagcacttaaagaccgccattggaaacagctcatgaaaaggcttcacgttaattgggttgtttctgagctaacccttggccaaatctgggatgttgacttgcagaaaaatgaagcgattgtcaaggatgtactgcttgtggcacaaggggagatggctttggaagaatttttgaagcagataagagaagtgtggaatacttatgaactagacttggttaattatcagaacaagtgccgcttgatccgtggctgggatgacctcttcaacaaggtcaaagaacacatcaacagcgtctcggccatgaagctctctccgtattacaaggtttttgaagaggatgctctcagctgggaagataagctgaacaggatcatggctctctttgatgtgtggattgatgtgcagaggcggtgggtctacctggaaggtatcttcacaggcagtgcagatatcaagcacctgctgccagtggaaacccagcggtttcagagcatcagcactgagtttttggctctaatgaaaaaagtgtccaagtctccccttgttatggatgttctgaacatccagggagtacagaggtctctggaaagattggcagacctgctaggaaagatccagaaagcattgggagaatatctggaaagagagcggtcatctttccccaggttctattttgtgggtgatgaagatttgcttgaaatcattggaaacagcaagaatgtcgctaaattacagaaacacttcaagaagatgtttgctggagtttcgagcatcatcctgaacgaggataactctgttgttttgggtatttcatctcgggaaggagaggaggttatgtttaaaactcctgtgtcaattactgaacatcccaaaatcaatgagtggctcacattggtagaaaaggagatgagagtcaccctggccaaactgcttgctgagtctgttacggaagttgagatttttggtaaagcaacttcaattgacccaaatacctacatcacttggattgataaataccaggcccagcttgtggttttgtcagcccagatagcctggtctgagaacgtggagaccgcactgagcagcatgggcggaggtggagatgccgcgcccttgcactctgtgctgagcaatgtggaggtcaccctcaatgtgttagcagactctgtcctcatggagcagcccccactccgaaggcggaagctagaacacttgattacagagttggttcaccagagagatgttacaaggtccttgatcaaaagcaagattgacaacgccaaatcttttgaatggctcagccagatgcgattttactttgaccctaagcaaactgatgtgttacagcagttgtcaattcaaatggcaaatgccaaatttaactatggctttgagtacctgggtgttcaggacaaactggtccagacccccctcactgaccgctgctatttgacaatgacacaagccttggaggccaggctggggggttccccatttggacctgctggaactgggaaaacagagtctgtcaaagctcttggccatcagcttggacggtttgttttagttttcaactgtgatgaaacctttgatttccaggcaatgggccggatctttgtgggcctttgccaggtgggtgcctggggctgctttgacgagttcaaccgcctggaggagcggatgctctcggctgtgtcccagcaggtgcagtgcatacaggaagcactgcgtgaacattccaaccccaactacgacaagacctctgcccccattacttgtgagctgctgaacaaacaagtcaaggtgagcccggacatggccatcttcatcaccatgaaccctggctacgcgggccggtctaaccttcctgacaacttgaagaagctgttccggagcttggccatgaccaagcccgaccggcagttaatcgcccaggtcatgctgtactcacagggtttccgcactgctgaagtgcttgccaacaaaatcgtcccgttttttaaactatgcgatgagcagctctcttcccaaagccattatgacttcggtcttcgggctttgaagagtgtgctggtgagtgcaggcaatgtgaagagagagagaatccagaagataaagagggagaaagaggaacgaggggaagcagttgatgaaggagaaattgctgaaaatctccctgaacaagagattctgatacagagcgtctgtgagacgatggtgccaaagctggtggcagaggacatcccgctgctcttcagcctcctgtcggacgtgttccctggagtccagtatcacaggggtgagatgactgcccttcgagaggagctgaagaaagtgtgtcaggagatgtatttgacatatggagatggagaagaagttggtggaatgtgggttgaaaaggttctccagctctatcagatcacccagatcaatcatggcctgatgatggtggggccctcgggaagtgggaagagcatggcctggcgtgtcctgctgaaggcattggagagactcgagggtgtggaaggtgtggcccatatcatcgaccccaaggccatcagcaaagaccacctctacggaaccctggaccccaacaccagggaatggacagatgggctcttcacacacgtgctgagaaagatcatcgacagcgtgagaggcgagctgcagaagcgccagtggatcgtcttcgatggcgatgtggatccagagtgggttgagaacttgaactcagtgctggatgacaataagctcctaactttgcccaatggagagcgcctcagtcttccacccaatgtgagaataatgtttgaggtacaggacttgaaatacgcgaccttggccacagtgtcgcgctgcggcatggtctggttcagtgaggatgtgctgagcaccgacatgatcttcaacaacttcctggccaggctgcgcagcatcccgctggatgaaggggaggatgaggcacagcggcggcgtaagggcaaagaggatgagggggaggaggccgcttcccccatgctgcagatccaaagagatgcagctacgatcatgcaaccgtacttcacgtccaacggcctggtcaccaaggcgctagagcacgccttccagctggagcacatcatggacctaacacgcctgcgctgcctgggctcgctcttctccatgctgcaccaggcctgccgcaacgtggcgcagtataacgccaaccatcccgacttccccatgcagatcgagcagctggagcgctacattcagcgatatctggtttatgccatactctggtccctgtctggagacagccggctaaaaatgagagcagagctgggtgaatacatcagaagaatcacgaccgtgcctctgcccactgcgcccaacatacccattatcgattatgaggtgtccatcagcggagaatggtctccgtggcaggccaaggtgcctcagattgaagtggagacgcacaaggtggcagcccctgatgtcgtcgtgccaacgctggacacagtccgccacgaagccctcttgtacacttggctggccgaacacaagcccctggtcttgtgtggccctcctgggtctggcaagaccatgacactcttcagcgccctccgggccttgcctgacatggaggtggtgggtctcaacttctccagtgctactactccagagctgcttctgaagacttttgatcactactgcgagtacaggcgcacacctaatggggtggttttggctcctgttcaacttggaaagtggctggtgttgttctgtgatgaaatcaacttgccagatatggataaatatgggacccagagggtcatatccttcatcagacagatggtggagcacggaggcttttaccgtacctcagatcaaacatgggtgaagctggagagaatccagtttgttggggcttgtaatccccccacagaccctggaagaaagcccctctcacacaggttcctgcgccacgtgcctgtcgtgtatgtggattacccgggccccgcctccctcacacagatctacggcaccttcaaccgcgccatgctgaggctcattccatccctgcggacgtatgcagagccgctcactgctgccatggtggagttctacaccatgtctcaggagagattcacccaggatacacaacctcactatatctattcaccccgtgaaatgactaggtgggtgagaggcatctttgaagcgctgagacctctggagaccctgcctgttgaaggcctcattcggatttgggcacatgaagctctgcgtctcttccaagatagactcgtagaggatgaggagaggcgttggactgatgagaacatcgacacggttgctctgaagcacttccctaacatcgacagagagaaggcaatgagccgacccatcttgtacagcaactggctgtcaaaggattacatcccagtagaccaagaagagttaagagattatgtcaaagctaggctgaaggtcttttatgaagaagaacttgatgttccgctggtgctgtttaatgaagtcctagaccacgtgctgaggattgacagaatattccgtcaacctcaaggccacttgcttctgattggtgttagtggagcaggaaaaactaccctgtctcgtttcgtcgcctggatgaacggtttgagtgtgtaccagattaaggtccataggaagtacacaggggaagactttgatgaagatctacggacagtgttgagacgttctggctgtaaaaatgaaaagatagcatttataatggatgaatctaatgtgttagattctggattcctggagcgaatgaatacccttctggccaatggagaggtgcctggtctctttgaaggagacgagtatgccaccttgatgacgcagtgcaaagagggggcacagaaggaaggcctgatgctggactcgcacgaggagctctacaagtggttcactagccaggttatccgcaacctccacgtcgtgttcaccatgaacccgtcctcggagggactcaaggaccgggcagctacatcaccagcacttttcaacaggtgtgtgttgaattggtttggagactggtccaccgaagcactgtatcaggttggcaaagaattcacaagtaagatggatctggagaagccaaattacatcgtgcctgattacatgccagttgtgtatgataagctgccgcagccaccatcccatcgggaagccattgtgaacagctgtgtgtttgttcatcagactcttcaccaggcgaatgctcggctagcaaagcgaggcggcagaacgatggccatcacccctcgccactacctggacttcatcaatcactatgccaacctgttccacgagaagcggagcgagctggaggagcagcagatgcacttgaacgtggggctcaggaagatcaaagagacagtcgaccaggtagaagaactgcgtcgtgacttgaggataaagagccaagagctggaggtgaagaatgcagcagccaatgacaagctgaaaaagatggtgaaagaccagcaggaggctgaaaagaagaaggttatgagccaagaaatccaggaacagctgcataagcagcaggaggtaattgcagacaaacagatgagtgtcaaagaagatcttgataaggtggaacctgccgtcattgaggcccagaatgctgtgaagtcgatcaagaagcagcacctggtggaggtgaggtccatggccaaccctcctgctgctgtgaagctggcgctggagtccatctgcctgctgctgggggaaagcaccacagactggaagcagatccgctccatcatcatgcgggagaacttcatccccaccatcgtcaacttctctgcagaggagatcagtgacgccataagggagaagatgaagaaaaattacatgtccaatccaagttacaattatgaaattgtgaatcgggcttccctggcttgcggccctatggtgaaatgggcaattgcacagcttaactatgcagacatgttaaagagagtggagcccctacgcaatgagctgcagaagctggaagatgacgccaaggacaaccagcagaaggccaacgaggtggagcagatgatccgagacctggaagccagcatcgcccgctacaaggaggaatacgccgtcctgatctcagaggcccaggccatcaaggcagacctggcagctgtcgaggcaaaagtaaaccggagcactgctcttctgaagagcttgtctgctgaacgtgaacgatgggaaaaaacaagtgaaactttcaaaaaccagatgtccaccattgctggggactgtctcttgtcagctgcgttcattgcctacgcgggttactttgaccagcagatgcgtcagaacttgttcactacctggtcccatcacctacagcaagccaacatccagttccgtacagatattgccaggacggaatacctttccaatgctgatgagcgtcttcgctggcaggccagctccttgcctgctgatgacctttgcacagaaaatgccatcatgctgaaacgattcaataggtatccgctgatcattgacccctctggacaggccacagaattcattatgaatgaatataaggatcgtaagatcacacggaccagcttcctggatgacgccttcagaaagaacttagagagtgcactgagattcggtaacccccttctggtccaggatgtggaaagctacgatccagttttgaacccggtgctgaaccgtgaagtgcggcgaacaggggggagagtgctgatcactctcggggaccaggacatagacctgtcgccatcgtttgtcatcttcctgtccacccgggatccaactgtcgagttcccaccagatctctgttcccgggttacttttgtaaacttcacagttacccgtagcagtttacaaagccagtgtctaaatgaagtacttaaagcagaaagacctgatgtggacgagaaacgatctgatcttcttaaacttcaaggggaatttcagctccgtttgcgtcagctggaaaaatctctactacaagctctgaacgaggtgaaagggcgcattttggatgacgacacgatcataaccactctggagaacctgaagagagaggctgcagaggtcaccaggaaagttgaggagacggacattgtcatgcaggaggtggagaccgtgtcccagcagtacctcccgctctccaccgcctgcagcagcatctacttcaccatggagtccctcaagcagatacacttcttgtaccagtactccctccagtttttcctggacatttatcacaacgtcctatacgagaacccgaacctgaagggtgtcaccgaccacacacagcgcctgtccattataacaaaggacctcttccaggtggcgtttaaccgagtggctcgaggcatgctgcatcaggaccacattacctttgccatgctgctggcaagaatcaaactgaagggcaccgtgggggagcccacctacgatgcagaattccagcacttcttgagaggaaatgagattgtcctgagtgctggctccacccccaggatccagggcctgactgtggagcaggcggaggcggtggtgaggctgagctgccttcccgcgtttaaggacttgattgcaaaggttcaggcagacgagcaatttggcatctggctggacagcagctccccggagcagactgtgccctacctctggagtgaagaaacacctgcaacacccattggccaggccatccaccgcctgctcctgatccaggctttccggcccgatcgcctgttggccatggcccacatgtttgtttcaacaaaccttggggagtctttcatgtccatcatggagcagccgctcgacctgacccacattgtgggcacagaggtgaagcccaacactcctgtcttaatgtgctctgtgcctggttatgatgccagtggacatgtcgaggaccttgcagccgagcagaacacgcagatcacttcaattgcaatcggctctgcagaaggctttaaccaagcagataaggcaataaacaccgctgtaaagtcgggcaggtgggtgatgctgaagaatgtgcatctggccccagggtggctgatgcagctggagaagaagttgcattccctgcagccgcatgcctgcttccgactcttcctcaccatggagatcaaccccaaggtgcctgtgaatctgctccgtgcgggccgcatctttgtgttcgagccaccgccaggggtgaaggccaacatgctgaggacgttcagcagcattcccgtctcacggatatgcaagtctcccaacgagcgtgcccgcttgtacttcctgctggcctggtttcatgcgatcatccaagaacgcttacgatacgcaccactggggtggtcaaagaagtatgaatttggagagtctgacctgcggtcagcttgcgatacggtggacacgtggctggatgacacggccaagggcaggcagaacatctcaccggataagatcccgtggtctgcactaaagaccttaatggcccagtccatttatggcgggcgcgtggacaacgagtttgaccagcgtctgctcaacaccttcctggagcgcctgttcacaaccaggagtttcgacagtgagtttaagctggcatgcaaggtcgacggacataaagacattcaaatgccagatggcatcaggcgagaggagtttgtgcagtgggtggagttgctccccgacacccagacgccctcctggctgggcctgcccaacaacgccgagagagtcctccttaccacacagggtgtggacatgatcagtaaaatgctgaagatgcagatgttggaggatgaggacgacctggcctacgcagagactgagaagaagacgaggacagactccacgtccgacgggcgccctgcctggatgcggacactgcacaccaccgcgtccaactggctgcacctcatcccccagacgctgagccacctcaagcgcaccgtggagaatatcaaggatcctttgttcaggttctttgagagagaagtgaagatgggcgcaaagctgcttcaggacgttcgccaggaccttgcagatgtcgtccaggtgtgcgaaggaaagaagaagcagaccaactacttgcgcacgctgatcaacgagctagtgaaagggatcttgcctcggagctggtcccactacacggtgcctgccggcatgaccgtcatccagtgggtgtccgacttcagcgagaggatcaaacagctgcagaacatctcactggcagctgcatctggtggcgccaaggagctaaagaacatccacgtgtgcctgggtggcctgttcgtgcctgaggcgtacatcactgccaccaggcagtatgtggcccaggccaacagctggtccctggaggagctctgcctggaagtcaacgtcaccacctcacagggcgccacccttgacgcttgcagcttcggagtcacgggtttgaaacttcaaggggccacgtgcaacaacaacaagctgtcactgtccaatgccatctcaaccgcccttcccctgacgcagctgcgctgggtcaagcagacaaacaccgagaagaaggccagtgtggtaaccttacctgtctacctgaacttcacccgtgcagacctcatcttcaccgtggacttcgaaattgctacaaaggaggatcctcgcagcttctacgagcggggtgtcgcagtcttgtgcacagagtaaacttttctagctgcccctttctgtaatagtgaaagttggtatttaacatttattcatttttaaaatatttggaaggtctgagcttgtgaaaagaaagtggttggtctgaggttggaggaagctgaatggaatctgacggttgggagtggtggaaattggaaggataccaggaggtatttgggaaggccaatggcgtggctcctttgaggaaataaaacactaagcatgagccggcaaaaaaaaaaaaaaaaaaaaa

SEQ ID NO: 2045 - DNA, 3705 bp, Homo sapiens
acggcgcgcggcgagctgagggtggcggcggtcgacatgttccaggtcccggatagcgagggcggccgcgccggctccagggccatgaagcccccaggaggagaatcgagcaatctttttggaagtccagaagaagctactccttccagcaggcctaataggatggcatctaatatttttggaccaacagaagaacctcagaacatacccaagaggacaaatcccccagggggtaaaggaagtggtatctttgacgaatcaacccccgtgcagactcgacagcacctgaacccacctggagggaagaccagcgacatttttgggtctccggtcactgccacttcacgcttggcacacccaaacaaacccaaggatcatgttttcttatgtgaaggagaagaaccaaaatcggatcttaaagctgcaaggagcatcccggctggagcagagccaggtgagaaaggcagcgccagaaaagcaggccccgccaaggagcaggagcccatgcccacagtcgacagccatgagccccggctggggccgcggcctcgctctcacaacaaggtcctgaacccaccgggaggcaaatccagcatctccttctactaagagaagccactgctccacccggagccagaccagaaactcaagagatagggtagccatgttttcatttccttttgcccaaatgagcggggtgggaagagggttagtcttatgtgagcctggctgctcagcgtctcctggccgtcatgacagctgcttggagacccgtgccttccagatggctgggagatgcctctgtggggatgaaatggggcacccctggccatcactcatgtgtagtccaggtttgagaggaactggaaggggggtgagggtggggaggtggggcagggcatggtccttggatcaacagcccgccagctgattggatgtctaggaatgactgaaagaaaccaaaacagcctgtccactgctgctgtgggatggaggaggcgtaagcagaaacactaacagtatattgacctcttagcagaaccgcttccattctggagatcacggctgctaaatccagcatccccacttcattttacccccagcatattgttctgtagtcttttcttgaaacatcttgattgcttttcctcggcagctttcaaaaaaccaaataataatagttatccgtcttctacttcatggaagattgttttggtgccctgaccctctgaagtgcccagttcctgccatctgaaacctcggcctgatctgatctcatgttggaatctgcctgtctttcacacagggctggtcttggtcctttacatgccagttttgcttgtgaattcttgcttttttcctctcatcagccttaagtttaggcgtttgttgttctccagtgatgtagacagttcccttcacaagtcacagttcttcccataaatgaggcccgctgacctctgcgggactttaaaaatctattcagatatttccgagtaagtggcttgtttaaattcttcctgtgtctttctttattccttaattggttggtggaaagaagagatgcttgggaaccttgggttcttaggtttggattctttaataatatctaaaaagctaaattttaaataccagctttacataaatgattgttgactctggtctgtttctgacacctttccagaaaaaagtcaattgttcaggtacaccaaagaggaagaagagctgtggaggccaccctctacaaagctttatagaacttctggatctaactcacaaacaagcttccagaagagactagagaccttaggccaggagatgaaggagttcagtagcaaagtcacacctgtccaattccctgagctttgctcactcagctaatgggatggcaaaggtggtggtgctttcatcttcaggcagaagcctctgcccatccccctcaagggctgcaggcccagttctcatgctgcccttgggtgggcatctgttaacagaggagaacgtctgggtggcggcagcagctttgctctgagtgcctacaaagctaatgcttggtgctagaaacatcatcattattaaacttcagaaaagcagcagccatgttcagtcaggctcatgctgcctcactgcttaagtgcctgcaggagccgcctgccaagctccccttcctacacctggcacactggggtctgcacaaggctttgtcaaccaaagacagcttcccccttttgattgcctgtagactttggagccaagaaacactctgtgtgactctacacacacttcaggtggtttgtgcttcaaagtcattgatgcaacttgaaaggaaacagtttaatggtggaaatgaactaccatttataacttctgtttttttattgagaaaatgattcacgaattccaaatcagattgccaggaagaaataggacgtgacggtactgggccctgtgattctcccagcccttgcagtccgctaggtgagaggaaaagctctttacttccgcccctggcagggacttctgggttatgggagaaaccagagatgggaatgaggaaaatatgaactacagcagaagcccctgggcagctgtgatggagcccctgacattactcttcttgcatctgtcctgccttctttccctctgcgaggcagtggggtgggattcagagtgcttagtctgctcactgggagaagaagagttcctgcgcatgcaagccctgctgtgtggctgtcgtttacatttgggaggtgtcctgtatgtctgtacgttggggactgcctgtatttggaagatttaaaaacctagcatcctgttctcaccctctaagctgcattgagaaatgactcgtctctgtatttgtattaagccttaacacttttcttaagtgcattcggtgccaacattttttagagctgtaccaaaacaaaaagcctgtactcacatcacaatgtcattttgataggagcgttttgttatttttacaaggcagaatggggtgtaacagttgaattaaacttagcaatcacgtgctcagagcttttgcctgtcagttgtgtgtgtcccttatagtcccttcccccacagctcttgctgaaagagtttgccttgttttgttttgttgttttgtatttagccagaggatgccaaaattagtcttctcaaagctttgagtagagtaagtgtgggaataagccagtttttttttttctgtttctgtaacttaaatgaacgggtttttttcccttgtatgccacttgtcctaacatgtccttaaggtgtttaacctgcctctgacctggcttgcaatgcataggtgaggagaagcagagagcttgtcatatgcaagtcctgtcaagaaaacaggtgggcatggtggctcaggtctgtagtctttgggtctttgggaggccagggtgggaggatcacttgagctcaggagtttgagaccagcctagacaacatactacgaccctgtctatacaaaaaaaaacttctctaaattagccggatgtggtggtgcatgcctgtagtcccagctactcgggaggctgagtgaggcaggaggatcacttgagaccaggaggttgtggctgtagtgagtgatgatcatgccactgcacttcagcctggaccacagagcaagaccctgtgtaaaaaaataaaataaaaaacagattggaaaaaaaaaaaaaaaaaaaaaaa

SEQ ID NO: 2046 - DNA, 12615 bp, Homo sapiens
gtgtacgtgtaaaattatgatcaaataaatttgtatgccttttctcctattaacctgccttttttgtcagcgattgtcagtgaaacttcagagggcaaaggggaagttttccttggcccctccagttttggtgctgtgaacaggataccaaagctgctctgttcttctggaagctgcaatgaagggaaccaaggacctgacaagccagcagaaggagtctaacgtgaagacattttgctccaagaatatcctagccatccttggcttctcctctatcatagctgtgatagctttgcttgctgtggggttgacccagaacaaagcattgccagaaaacgttaagtatgggattgtgctggatgcgggttcttctcacacaagtttatacatctataagtggccagcagaaaaggagaatgacacaggcgtggtgcatcaagtagaagaatgcagggttaaaggtcctggaatctcaaaatttgttcagaaagtaaatgaaataggcatttacctgactgattgcatggaaagagctagggaagtgattccaaggtcccagcaccaagagacacccgtttacctgggagccacggcaggcatgcggttgctcaggatggaaagtgaagagttggcagacagggttctggatgtggtggagaggagcctcagcaactacccctttgacttccagggtgccaggatcattactggccaagaggaaggtgcctatggctggattactatcaactatctgctgggcaaattcagtcagaaaacaaggtggttcagcatagtcccatatgaaaccaataatcaggaaacctttggagctttggaccttgggggagcctctacacaagtcacttttgtaccccaaaaccagactatcgagtccccagataatgctctgcaatttcgcctctatggcaaggactacaatgtctacacacatagcttcttgtgctatgggaaggatcaggcactctggcagaaactggccaaggacattcaggttgcaagtaatgaaattctcagggacccatgctttcatcctggatataagaaggtagtgaacgtaagtgacctttacaagaccccctgcaccaagagatttgagatgactcttccattccagcagtttgaaatccagggtattggaaactatcaacaatgccatcaaagcatcctggagctcttcaacaccagttactgcccttactcccagtgtgccttcaatgggattttcttgccaccactccagggggattttggggcattttcagctttttactttgtgatgaagtttttaaacttgacatcagagaaagtctctcaggaaaaggtgactgagatgatgaaaaagttctgtgctcagccttgggaggagataaaaacatcttacgctggagtaaaggagaagtacctgagtgaatactgcttttctggtacctacattctctccctccttctgcaaggctatcatttcacagctgattcctgggagcacatccatttcattggcaagatccagggcagcgacgccggctggactttgggctacatgctgaacctgaccaacatgatcccagctgagcaaccattgtccacacctctctcccactccacctatgtcttcctcatggttctattctccctggtccttttcacagtggccatcataggcttgcttatctttcacaagccttcatatttctggaaagatatggtatagcaaaagcagctgaaatatgctggctggagtgaggaaaaaaatcgtccagggagcattttcctccatcgcagtgttcaaggccatccttccctgtctgccagggccagtcttgacgagtgtgaagcttccttggcttttactgaagcctttcttttggaggtattcaatatcctttgcctcaaggacttcggcagatactgtctctttcatgagtttttcccagctacacctttctcctttgtactttgtgcttgtataggttttaaagacctgacacctttcataatctttgctttataaaagaacaatattgactttgtctagaagaactgagagtcttgagtcctgtgataggaggctgagctggctgaaagaagaatctcaggaactggttcagttgtactctttaagaacccctttctctctcctgtttgccatccattaagaaagccatatgatgcctttggagaaggcagacacacattccattcccagcctgctctgtgggtaggagaattttctacagtaggcaaatatgtgctaaagccaaagagttttataaggaaatatatgtgctcatgcagtcaatacagttctcaatcccacccaaagcaggtatgtcaataaatcacatattcctaggtgatacccaaatgctacagagtggaacactcagacctgagatttgcaaaaagcagatgtaaatatatgcattcaaacatcagggcttactatgaggtaggtggtatatacatgtcacaaataaaaatacagttacaactcagggtcacaaaaaatgcatcttccaatgcatatttttattatggtaaaatatacataaatataattcaccattttaacatttaattcatattaaatacgtacaaatcagtgacatttagtacattcacagtgttgtgccaccatcaccactatttagttccagaacatttgcatcatcaatacattgtctagagacaagactatcctgggtaggcagaaaccatagatcttttgtgtttacagctatggaaaccaactgtaccataaagatagttcactgagttttaaagccaagccacatcttatttttccaaggtttaatttagtgagagggcagcattagtgtggagtggcatgcttttgccctatcgtggaatttacacatcagaatgtgcaggatccaagtctgaaagtgttgccacccgtcacacaacatgggctttgtttgcttattccatgaagcagcagctatagaccttaccatggaaacatgaagagaccctgcacccctttccttaaggattgctgcaagagttacctgttgagcaggattgactggtgatgtttcattctgaccttgtcccaagctctccatctctagatctggggactgactgttgagctgatggggaaagaaaagctctcacacaaaccggaagccaaatgtcccctatctcttgaatgatcaagtcacttttgacaacatccaggtgaatataaaaacttaataaagctgtggaaaggaactcttaatcttcttttctgctacttaggttaaattcactagatcttgattaggaatcaaaattcgaattgggacatgttcaaattctttcttgtggtagttgcctatactgtcatcgctgctgttggttgagcatttgtggtgtaccacgctgtgtgctcaagggtattacattcatcttctcatttaatcctcacaacaatctgaagaaggtaggtattacaattcccacttcatagaaacagaaactgaggttcagagaggttaagtcatttgcccaaatggctgagccaaagcctaccatgtacctaacctttattttctttcccgaacataccaggctgtctcctcataacttccaagcatgcacttaaaactccacatgaatacaaggttcatgggacttggtattcatagaaagggaggcagaaagctggtctgttcctgataggcttgtaatttaatatcattctgttcatgtgctttggatggaagcacatctggcatatgatgctaatcagtggttcccatacccctggcttcctaattttaatgtttgctcacagcatagtagattgacatcaaatagtggccgatgatgatgaaaataaaggtcaaataagttgagccaataacagccgcttttttccttctgtctgcgtatacaaagcactgtcatgcacacaatctattctgaccctcacaacaacccataagggtgtaaatagtatttccattttacaaatgaggatcacacaaactactacatggcagagcagatactccaactcatgtcttctggttgaagcctattgctttttcttttctaaacactttccctcagcaagttggaattagacttcacaagtctccttcagagaacacaaatcttttcttattccattcctgtttggttgcctacgtccaatctccccctccccagagatgccaaaaaaaaaatcctttaaggtatttgggagccaaactcaacttgttaaaatctcaaattatggagacaatcagcagacacaacctaaccccaattattttggcaggaaggttggtttagaggcagatccagcaatctgctttgggccactctgggtggggtaggtgaaataagattggtcactgttaactaattttaatattggattggccattggttatcactgattaccattctcccctggattttcacccaggactcaaaacttggttctgctaaccctgttcctttatgaggaaccttttaaagattcctttataaggtgggagttttttttctatgaacctataggggagaaaaaagatcagcagaagtcattacttttttttttttttttttttttttttgagagagagtctcactccattgcccaggctggagtgcagtggtgctatctcggctcactgcaacctccgcctcctgggttcaagcaattctcctgcctcagcctcccgagtagctgggattgcaggtgcccaccaccacacccggctaatttttgtatttttagtaaagacagggtttcaccatgttggccaggctggtctccaactcccaatctcaggtgatcctattgcctcgggctcccaaagtgctgggattacaggagtgagccaccatgcctggccagaagtggttacttctgtagacaaaagaataatgctacttaatcaggctttctgtgtgacaagaaagagaaagaaaataaagaagtttcaattcatccaattcttaataagaaatatgtaaataaaattttttaaaattacacttcattttaatgttgtatcagtcaaggtccctgcaagagatggatggtatggtacactcaaactgggtaacacaggagagttttcagaaagcaactaaatccaaaatactatcaaggaatcaatataaaaattgttaatatttttctcatactaaattttcaaaatattttgtgtctattacatttacagcacatcttaattaggactagctgtgtgttcacctcacatgtggcttgtagctaccatactggacagcacatgtccaaaaaaatacacgtaaagttaaagtttaaaagacacaggaactaagccctcattgtctttcccttgggaggtagtttaaagagctatagatgctgtaacattcttgctattatttattatatatgacattattcctaaaaaagcttttgagatcctaggttgtattcctcaggttttgttgccttcccatgaagatgtgaaggcagggatgcctgttattcagtccaagatgcatgacaagagaccttgggaaagtttcatctggatttaaagattaattcttgatgcttacattccatactcaaaatgtaaatttgaatattaaaataaagatgattttttttttggagctagtcttgctctgttgcccaggctggaatgcagtggcatgatcatggctcactgcagcctcgacctcccaagctcaagcaaggctacaggtgtgcacctaagtagctaggactacaggtgtgcaccaccatgtctagctatttttttttctgtagagacagggttttcctatgttgtccaggctggtctcgaactcctgccctcaagcaatcctcctgccttggcctcccaaagtgttgagattacaggcgtaagccactgcacctggccaagatgaatattttaatagctcacagaacaaagtttgccacataatgataaaattactatgaaaatatattccctttattgtcagtttaaaagatgaactgagtttcacccaaactggtctggcccctctctgattcaaataccaatagttgctctgattcaaattccaactgttagaacatgacagctgctcataactagctttgcttactaaccatgtttctttccatttgtattaggtcctttactttttataacagcctcaaagtttcatgaattgctgcagtaaacattgattttcatgtttgtgagtctgcaagccagctgggcagctctacttcaggtggtaagggtggatcagacctattccatatacctcttgttctccttgtccagtggtttctagggatatgttctcatgatgaaccccgcagaggctcgtgaaagtgagaggaaactaggatgcctcttaaggtcttggtcaggatggggtctcctgtcacttctgtcacaggctattgtaagtcatatgagcaagctcaataaaatataaacaagtcagataaacagtgggaggaatggcaaagtcatatggccaaggccatgagtgattaattttaacacaggaaaaaagtaaagcattaaatgcgattatttaatatacaatgtcttattaactgaaatataaaatgtgtttactgtaaaatataatctgtttatctcaccaaagaaatattatctttaaaaaatgtcattacttctaagacatcatcagtctgcaacttctttccatagccttaatcaggatgctgtggcagctcccacattagcctcgcattctaaactggtagatgtcctaggaaaccatacatctatgtatttttcttattttatacgtttaggacaatgtatagctaattacccaactttttatttgcatacaaatctaatacaactgaacacaatcagttttatcacaggtataatggatttttcaatagtgaggaggtgcctccatgagccttctctttagaaaagtggcattcaagactcttcatttgaagtgaagattgctatgtcttttgcattgctctattttacataaattaagttataaattgacactataatcaactgacaccatgatcagtgatgatgatcaccctcatcagcactagagttgacttgtttttataacccctttgcatgtatgttgaatagcaaagttcatcagagaacatgtattagtcaatggtaagtaagatactctcatctaagaaataacatcacctcttctaatgaagttctaagaagagagggaagaaaaagtcttgggagctagtcagggaatagtgtgtatttgcaattacctaaactgaactctaccattactcctaacccagttcctcctcctgtgttttacatgattaatgccacccctgcctcaatgaaccaagatcagctccatcactgggacctccccattctgcctgtgcaatatttttcttttttatttctccttctaatattactgttattgctccagtaaagagctgtaatatattttacctggactgataccaggaatggtggtgttgcttccaatctgttgctgctagattaatctttgcaaagcacaggcttaatttcattgctgctcaactaaaaccactggtggctttccattgcctacaaaataaagtcaacctccccatcagacattcaaggctttcaatgatccatggccgccagctctctccaggctcatatcccactccactcctctgatgtttcctacactacactacactatactacactacagccaggtagaatgactgttcacccaacaccactcaggttgtcttctcaacttggaatactcttgcaccttcaaagctcatttcaaatgccccttcatttgtgaagccttctccaaatttccaagtcagaatgtctcttccttgtgctaccacaaccctttaactgagcctccattagtgcactgagaccattctgttcagtgtctgggtgaagcttcctggtgaaaaatatgttacctatttctttctgaaaagttggattcagggatattatcacggacctaaggtaatagttctagccaacctccctgtccactgccaggccgactacaaacccttctgttgctggcgagctggtccgcaccactagttctgcttcactctatttatctcttgatgtaaccatcttctttctccaggttttaagaaccagcccaactcctggttccctgatgaagcttttattcccctagccacatggaacttttcctttttggaacatgcctttagtttctgtgtagtttgccatgcagcacttcattgtacacattattaaaacagaattttaaggattagaatgaaccttaaaagatcatgcatctcaaaatttaatgtacatacaaattacccagggattttgttgaaataaaaattatttaattttaattaatataaataattcagtaggtctggggtgaggcctgaggttttacatttccaacaagctgccaggtaaagccaatacatctgtccaggaatcacactttgcgtatcaaaggtctagatgacattatcattccaaagagtttcttttacaggctctcagatcagtgttcatccactacctgactactgtcattcacaggcattctgttccacagcaggccagctaacgtggtatttacaaagctcactcctcttatacaacaatccaagtgtttcttttgtcagttgtctgtgccccaggagatccctctctgccttgccttgccctctgcctttggagaccagcacctcatactcagtgaaggcctggagtgcttaagagggatttcttccagctctcttgccctggtcttcagtgtattagatgtattacctccatgctctcagtagaggcccataggaaagagtaggtaggttatgccagctcacacgcatcctttaaaaatggtttagaagtttagctggtttcttattactcctgtctatggatgtttccttctgtcactctactagggatgaaacagctaatcatgttcaatagttacatttagattggtttttaaaaactatgattgtattagttcgtttccatgctgctgataaagacatatctgagactggaaacaaaaagggtttaattggacttacagttccacatggctggggaggcctcaaaatcaggtgggaggcaaaaggtacttcttacgtggtggcatcaagagcaaaatgaggaagaagcaaaagcagaaactcttcataaacccaccagatcttgtgggacttattatcacgagaatagcacagaaaagactggcctccatgattcaattacctcccactgcgtccctcccacaacatgtgggaattctgggagatacaattcaagttgagatttgggtggggacacagccaaaccatatcattcctccctgggctcctccaaatttcataatcctcacatttcaaaaccaatcattccttcccaacagttccccaaagtcttaactcatttcagcattaacccaaaagtccacagtccaaagtctcatctgagacaaggcaagtcccttccacttacaagcctgtaaaagcaagctagttacctcctagatacaatggggggtacaggtattgggtaaatacagctgttccaaatgagagaaattggccaaaacaaaggggttacagggtccatgcaagtctgaaatccagtggggcagtcaaattttaaagctccataatgatctcctttgactccatgtctcacattcaggtcatgctgatgcaagagataggttcccatggtcttgtgcagctccgcccctgtggctttgcagagtacagcctccctcctggctgctttctcaggctgatgttgagtgtctgtagcttttccaggcacaagatgcaagttggtggttgatctaccattctggggtctaccattctggggtctaccgttctgggactgtggccttcttctcacagctccactaggcagtgccccaacagggactctgtgtgggggctctgccccacatttcccttccacactgccctaggagaggttccccatgagggctctgcccctgcagcaaacttttgcctggacatccaggtgtttccatatatattctgaaatctaggcagaggttcccaaatctcaattcttgacatctctgcacccacaggctcaacatcacatggaagctgccaatgcttggggcctctaccctctgaagccacagcccaagctctatgttggctcctttcagccatggctggagcagctgggacacagggcaccaagtccctaggctgcacacagcacagagaccctgggcccagcccacaaaaccactttttcctcctgggcctctgggcctgtgatgggaggggctgccatgaaggtctctgacatgacctggagacattttccccatggtcttggggattaacattaggctccttgctgcttatgcaaatttctgcagccagcttgaatttctccttaaaaaaaatgggtttttcttttctactgcatcatcaggctgcagattttccacatttatgctcttgtttcccttttaaaacagaatgtttttaacagcacccaagtcaccttttgaatgctttgctgcttagaaatttattccaccagataccctaagtcatctctctcaagctctaagttccacaaatctctagggcaagggtgaaatgctgccagtctccttgctaaaacataacaagggtcacctttacttcagttcccaacaaggtcttcatctccatctgagaccacctcagcctggaccttattgttcatatcactatcagtatttttgtcaatgccattcacagtctctaggaggttccaaactttcctacattttcctatcttcttctgagccctccagattatttcaacacccagttccaaagttgcttccacattttcgggtatcttttcagcaatgccccactctactggtactattagtccattttcatgctgctgataaagacatacctgagactgggaacaaaaagaggtttaattggacttatagttccacctggctggggaggcctcagaatcatggcaggaggtgaaaggcatttcttacacggcagcagcaagagaaaaatgaagaagcagcaaaagcagaaacccctgataaaaccatcagatctcgtgagacttattcactatcacaagaatagcatgggaaagaccagcccccttgattcaattacctccccctgggtcctgtgggaattctggaaggtacaattcaagttgagatttgggtggggacacagccaaaccatatcaatgattttgtactttaaccagctgaatggaagtacaatctcttgctatatgacacaataattatttgcaaaatgagtaaacatatcataaggaaattatttttacaaggtttgaaacctgaaatgcagtctattatcatacataactaaaaatagagcctcaataaacagattcccagttttgaaaatgcaacatttgtactccacattgtcagttttcttaggtatatttataaatactcctataaaaatgtaaagaaacacataatgtagattgctaattttataataacacaagttgattttgacatccaacttattaattatgaaatgacttttggcctagtaacaatgaaaatgggggcaaatacagataaatggtaattcttagaatgaactactcagcaccaattctaagtttttcttgatggtaaatcataatgttccctttctcctcggttctgcaatctataggcataccataattgtaatcaatagcttaaaaatatgtctctctgtcctattctgtatctgtatctcttggatttttacctttgcaatagtcaactgaaccatcttcttggagtactcatgaagatggaagtctacatggagaatacaggatgaatccactctgtctcctgcagtgaagtctgtttgaaggatgtatttggctgtcttctggacaggccattctaataacagaaacaaacaagttattttaaaacttattggaatattcaaatattaaccaaagtagaaaaatataatacacatccatgtgcccatcacagaacttcactgattatcatcatttagccagtcttgaagaagcaagtgctaattacaatcacaaatgaaacaagattcagacttcatgaagagcactgcgctataataaaagaagaaatgagcacatacattcttttactgacagtcaaatggtgaaggtgggcagaatcattatgtgatgcaacatggcaaaagtatacagacagtgcatccagaggaaggcaccttgctgaatgactagaatggaagtaggagacattttgcaggcccccttcatcctgcagggagaaccagaaccacagcagctctatttgcctattcctctttaaattacaaagttaaaatttgggagtagtagaaaatcaattggttatcttatagagtctcctagaatatttcattggcattgagaaggtggaaaatgcaaattatatactttaaaatgtaatttttgcttttcacatatgcttaaagcctaaaacctcttaataaacttcttctgaaatata

SEQ ID NO: 2047 - DNA, 2723 bp, Homo sapiens
ttcagttctagcgtcaacccggtgctctacgtcttcaccgctggagatctgctgccccgggcaggtccccgtttcctcacgcggctcttcgaaggctctggggaggcccgagggggcggccgctctagggaagggaccatggagctccgaactacccctcagctgaaagtggtggggcagggccgcggcaatggagacccggggggtgggatggagaaggacggtccggaatgggacctttgacagcagaccctacaacctgctgcccttccctgtccctttccaccccccacccaccctccagaggtcctcccgacggccatgaacactacatcttctgcagcacccccctcactaggtgtagagttcatctctctgctggctatcatcctgctgtcagtggcgctggctgtggggcttcccggcaacagctttgtggtgtggagtatcctgaaaaggatgcagaagcgctctgtcactgccctgatggtgctgaacctggccctggccgacctggccgtattgctcactgctccctttttccttcacttcctggcccaaggcacctggagttttggactggctggttgccgcctgtgtcactatgtctgcggagtcagcatgtacgccagcgtcctgcttatcacggccatgagtctagaccgctcactggcggtggcccgcccctttgtgtcccagaagctacgcaccaaggcgatggcccggcgggtgctggcaggcatctgggtgttgtcctttctgctggccacacccgtcctcgcgtaccgcacagtagtgccctggaaaacgaacatgagcctgtgcttcccgcggtaccccagcgaagggcaccgggccttccatctaatcttcgaggctgtcacgggcttcctgctgcccttcctggctgtggtggccagctactcggacatagggcgtcggctacaggcccggcgcttccgccgcagccgccgcaccggccgcctggtggtgctcatcatcctgaccttcgccgccttctggctgccctaccacgtggtgaacctggctgaggcgggccgcgcgctggccggccaggccgccgggttagggctcgtggggaagcggctgagcctggcccgcaacgtgctcatcgcactcgccttcctgagcagcagcgtgaaccccgtgctgtacgcgtgcgccggcggcggcctgctgcgctcggcgggcgtgggcttcgtcgccaagctgctggagggcacgggctccgaggcgtccagcacgcgccgcgggggcagcctgggccagaccgctaggagcggccccgccgctctggagcccggcccttccgagagcctcactgcctccagccctctcaagttaaacgaactgaactaggcctggtggaaggaggcgcactttcctcctggcagaatgctagctctgagccagttcagtacctggaggaggagcaggggcgtggagggcgtggagggcgtgggagcgtgggaggcgggagtggagtggaagaagagggagaggtggagcaaagtgagggccgagtgagagcgtgctccagcctggctcccacaggcagctttaaccattaaaactgaagtctgaaatttggtcaaccttgtgagtggggtacatgtgctgtgggtatcggggtgctcgtgggcgccctggtggggcccctctcggtagttgagagtcacgtcctttagttccccatgatttacaattttggaagggacacaaagaaacatagacttcccccatcccagatgattccgagtacatagtctgcagataatacttagcaaaacgcagtctacagactcctaaagcagcttgtctaggaagaccacccatgtgggcttatcactccaggttctgtgacccgggaccttctgagaaaacagcactgctgtgaaatatcttccttgaagcctgtgataagtctccttgttagaatgactccaacttcctgccaataatctttgtcctctccataggagatgttctaggggatgccttccttccctccatttcacaaagaggccagacttgaggactaagtcattagatcttatcccttagaattttgcatatcagcatctgctaacctccacaacacaccctggcacagggtggggctgagggccccaggaaacaaagattcccaaaagtgagagggatgagtcattatttcctagagatgactgttgttttagagaaccttggtccaactctgttctgacaaggttttaggaagatggcaacaacagtggcagcagtgtactttttggatctttctcataaaaaaacaaaagagcaagtaagagagggaaaccaaatatccacatgcaacatccgcaacaaatctagtatgtcaaggtttgacatactcccatggaccccaaagtatgagccagtgagaatgagtcatcaatatctcaagacccatataccagcatctgtgcagaaggatgcagaaggaagcaaagggatgttggatggacctaagaagaggagatccccaagctgtctacagatccttactggaaggtatggtgcaccaatttgagaacagcagctgaaactgggagggacctaacggagtatttcccagtcctctcgcccattctgtatggtgagcacataataggtacttatttagtgtttgtcgaattaataaagttcaaatgacatttccctggaaaaaaaaaaaaaaaaaa

SEQ ID NO: 2048 - DNA, 2520 bp, Homo sapiens
ggaagctatggtggtgtatctgtcatgaactacacacaagggaatgcttaaacaccagctgagtcatatcaggtgccttgtacacacacataaagagtctggtgaattctgacagtgttctgtttgccactagagcaaatttaatagctggggtttcacagcaactgttttagaaaactatatgtgccaaaaatttacattgggcagcagtttatagtgttcttggccaatctgcataaaagccacttgaggaggtttgattaagaaaattgtgtttatctcctgtattacctctgtgtttgatttattctttagtctcaaatttattttctgagtggactgattttctatatgaactgaaatgatgttttaatagaataataggtatttttagaggaaaagtatttttttgtgtaatttgcttacacaactaggacatacttcctatgatactgaatcatcgaattgagtcatttaaagctgaaagaggtgttaggaatgtagtttcagattatttaaatacatgaacagttttctatatattttgtgaaaatcttgatgagacactagaatttctttatggaattgaactttacaagaattttaataaaagaggtggatttcttcagctttctttgtgcttcagtttcatagctgaaaatgctgcttccgtttattaatatggactttgtaaggaaacacaacaacacgttttcttaccttctgtaaattttgtgatagacacatgttatttgtatatatgattgattgtttgcctgttgcaccctaaagttattttcaaaccatgtttattgcaaagagagcctttgggcaagtggaaaatgccctgatgctagaatgaggtagttccataagctagttaggagcttgctacctcttcttggtacctgaaatattctgaaaggatatcggagaggtcctatgcacccctgtctttcaaaacccacctccagcacttcagagtagtgtctctggagagtttaaaataaaagaatgaatgctattcagtggattccctcattgaggctcccatctttcctgccaggtgcagctttttctggttggaatcatctcttctttacggattgccgcattgtctctttgtgaatgaggcaggctgaactgtagagcatgaaactcattagaagtttataaagtaaagacctgtaaagcatgtgggtggaatgtttccatgctcttgaggtgaatattaaatttaaattctggcctttgggaactctttgcttgtgagctgaagaaggaaagaaggagttgggggtgtatatctaactgtgtttttctatatggaaatatatgagcatcaagtgataacttcaataaggcctcaggattgtatttaaaatacctgttttgtgggacagcatgcctttgttttctttgcctgttggctttggtggctccaaacattttcattttaggctagctttcctgtcacccaggttgtgtgcattttttttttcatttgaactattgtttatcattattaatgatgttatctccaaatcccaaagccaaggaaatagccagtatgcaggacttgcagtagatataagcattggtgttaacataggttaagttttgatagtgttcccagaaatatactgaattgagggataatgtagctttaaagaaattatgtttctttttaacatttggagaagccacctgtcctgggtccctattcttgagaaattcatcttttcatgcaaataacattgatgggggacaagactggatgattgacttctatcagtcagtagacaaggaagtataataattgccaaaggtgagggtaattttgccttacaagtatgtaggtcattctgtggtgggatttcccatcacatctagtaaaaaacaaccttttcatttccctcctttctaatccaagatcatatttttaaaaagtaggtttctgatatgccatgaaatatttctgtgaatctgtgtttttgaccaaggaaacagctgagatattaaaccatgtggttgttccacggttcatctggctaccgttctgggtcccctctgaccacctcaaaaagaaaatgaaattgggagattaaatcaagcttgacctcctcttttaatgaggaactttcacgttgacttcctatctcaggatattcttcagtttcatactgctgaggagaaaggaacaagctgcagacactgtaactggtctccagatgtgtgtatatgcgtgtaaaacttcacaccgtgtgtgttgtgttcaatgttgtgtcaatctacaaactgactcaaacaacagtttaacgatagagaagacagtgataatggcaaaaaaaacacccaaccacctttttccgtcaaagtgcttgctatggctttcatagctgggacaagtaacattaagtattcaggagcaaagtgttcttgaaagaaaatggtgtgttgatctcataagaaaatgtacaaccaataaaagacattttaaaaagaaaaaaaaaaaaaaaa

SEQ ID NO: 2049 - DNA, 5738 bp, Homo sapiens
gcagccgccacattcaacaggcagcagcgcagcgggcgcgccgctggggagagcaagcggcccgcggcgtccgtccgtccttccgtccgcggccctgtcagctggagcgcggcgcaggctctgccccggcccggcggctctggccggccgtccagtccgtgcggcggaccccgaggagcctcgatgtggatggccccgcgaagttaagttctgggctcgcgcttccactccgccgcgccttcctcccagtttccgtccgctcgccgcaccggcttcgttcccccaaatctcggaccgtcccttcgcgccccctccccgtccgcccccagtgctgcgttctccccctcttggctctcctgcggctgggggaggggcgggggtcaccatggccgaggcgcctcaggtggtggagatcgacccggacttcgagccgctgccccggccgcgctcgtgcacctggccgctgcccaggccggagtttagccagtccaactcggccacctccagcccggcgccgtcgggcagcgcggctgccaaccccgacgccgcggcgggcctgccctcggcctcggctgccgctgtcagcgccgacttcatgagcaacctgagcttgctggaggagagcgaggacttcccgcaggcgcccggctccgtggcggcggcggtggcggcggcggccgccgcggccgccaccggggggctgtgcggggacttccagggcccggaggcgggctgcctgcacccagcgccaccgcagcccccgccgcccgggccgctgtcgcagcacccgccggtgccccccgccgccgctgggccgctcgcggggcagccgcgcaagagcagctcgtcccgccgcaacgcgtggggcaacctgtcctacgccgacctcatcaccaaggccatcgagagctcggcggagaagcggctcacgctgtcgcagatctacgagtggatggtcaagagcgtgccctacttcaaggataagggtgacagcaacagctcggcgggctggaagaattcaattcgtcataatctgtccctacacagcaagttcattcgtgtgcagaatgaaggaactggaaaaagttcttggtggatgctcaatccagagggtggcaagagcgggaaatctcctaggagaagagctgcatccatggacaacaacagtaaatttgctaagagccgaagccgagctgccaagaagaaagcatctctccagtctggccaggagggtgctggggacagccctggatcacagttttccaaatggcctgcaagccctggctctcacagcaatgatgactttgataactggagtacatttcgccctcgaactagctcaaatgctagtactattagtgggagactctcacccattatgaccgaacaggatgatcttggagaaggggatgtgcattctatggtgtacccgccatctgccgcaaagatggcctctactttacccagtctgtctgagataagcaatcccgaaaacatggaaaatcttttggataatctcaaccttctctcatcaccaacatcattaactgtttcgacccagtcctcacctggcaccatgatgcagcagacgccgtgctactcgtttgcgccaccaaacaccagtttgaattcacccagcccaaactaccaaaaatatacatatggccaatccagcatgagccctttgccccagatgcctatacaaacacttcaggacaataagtcgagttatggaggtatgagtcagtataactgtgcgcctggactcttgaaggagttgctgacttctgactctcctccccataatgacattatgacaccagttgatcctggggtagcccagcccaacagccgggttctgggccagaacgtcatgatgggccctaattcggtcatgtcaacctatggcagccaggcatctcataacaaaatgatgaatcccagctcccatacccaccctggacatgctcagcagacatctgcagttaacgggcgtcccctgccccacacggtaagcaccatgccccacacctcgggtatgaaccgcctgacccaagtgaagacacctgtacaagtgcctctgccccaccccatgcagatgagtgccctggggggctactcctccgtgagcagctgcaatggctatggcagaatgggccttctccaccaggagaagctcccaagtgacttggatggcatgttcattgagcgcttagactgtgacatggaatccatcattcggaatgacctcatggatggagatacattggattttaactttgacaatgtgttgcccaaccaaagcttcccacacagtgtcaagacaacgacacatagctgggtgtcaggctgagggttagtgagcaggttacacttaaaagtacttcagattgtctgacagcaggaactgagagaagcagtccaaagatgtctttcaccaactcccttttagttttcttggttaaaaaaaaaaacaaaaaaaaaaaccctccttttttcctttcgtcagacttggcagcaaagacatttttcctgtacaggatgtttgcccaatgtgtgcaggttatgtgctgctgtagataaggactgtgccattggaaatttcattacaatgaagtgccaaactcactacaccatataattgcagaaaagattttcagatcctggtgtgctttcaagttttgtatataagcagtagatacagattgtatttgtgtgtgtttttggtttttctaaatatccaattggtccaaggaaagtttatactctttttgtaatactgtgatgggcctcatgtcttgataagttaaacttttgtttgtactacctgttttctgcggaactgacggatcacaaagaactgaatctccattctgcatctccattgaacagccttggacctgttcacgttgccacagaattcacatgagaaccaagtagcctgttatcaatctgctaaattaatggacttgttaaacttttggaaaaaaaaagattaaatgccagctttgtacaggtcttttctatttttttttgtttattttgttatttgcaaatttgtacaaacatttaaatggttctaatttccagataaatgatttttgatgttattgttgggacttaagaacatttttggaatagatattgaactgtaataatgttttcttaaaactagagtctactttgttacatagtcagcttgtaaattttgtggaaccacaggtatttggggcagcattcataattttcattttgtattctaactggattagtactaattttatacatgcttaactggtttgtacactttgggatgctacttagtgatgtttctgactaatcttaaatcattgtaattagtacttgcatattcaacgtttcaggccctggttgggcaggaaagtgatgtatagttatggacactttgcgtttcttatttaggataacttaatatgtttttatgtatgtattttaaagaaatttcatctgcttctactgaactatgcgtactgcatagcatcaagtcttctctagagacctctgtagtcctgggaggcctcataatgtttgtagatcagaaaagggagatctgcatctaaagcaatggtcctttgtcaaacgagggattttgatccacttcaccattttgagttgagctttagcaaaagtttcccctcataattctttgctcttgtttcagtccaggtggaggttggttttgtagttctgccttgaggaattatgtcaacactcatacttcatctcattctcccttctgccctgcagattagattacttagcacactgtggaagtttaagtggaaggagggaatttaaaaatgggacttgagtggtttgtagaatttgtgttcataagttcagatgggtagcaaatggaatagaacttacttaaaaattggggagatttatttgaaaaccagctgtaagttgtgcattgagattatgttaaaagccttggcttaagaatttgaaaatttctttagcctgtagcaacctaaactgtaattcctatcattatgttttattactttccaattacctgtaactgacagaccaaattaattggctttgtgtcctatttagtccatcagtattttcaagtcatgtggaaagcccaaagtcatcacaatgaagagaacaggtgcacagcactgttcctcttgtgttcttgagaaggatctaatttttctgtatatagcccacatcacacttgctttgtcttgtatgttaattgcatcttcattggcttggtatttcctaaatgtttaacaagaacacaagtgttcctgataagatttcctacagtaagccagctctattgtaagcttcccactgtgatgatcatttttttgaagattcattgaacagccaccactctatcatcctcattttggggcagtccaagacatagctggttttagaaacccaagttcctctaagcacagcctcccgggtatgtaactgaacttggtgccaaagtacttgtgtactaatttctattactacgtactgtcactttcctcccgtgccattactgcatcataatacaaggaacctcagagcccccatttgttcattaaagaggcaactacagccaaaatcactgttaaaatcttactacttcatggagtagctcttaggaaaatatatcttcctcctgagtctgggtaattatacctctcccaagcccccattgtgtgttgaaatcctgtcatgaatccttggtagctctctgagaacagtgaagtccagggaaaggcatctggtctgtctggaaagcaaacattatgtggcctctggtagtttttttcctgtaagaatactgactttctggagtaatgagtatatatcagttattgtacatgattgctttgtgaaatgtgcaaatgatatcacctatgcagccttgtttgatttattttctctggtttgtactgttattaaaagcatattgtattatagagctattcagatattttaaatataaagatgtattgtttccgtaatatagacgtatggaatatatttaggtaatagatgtattacttggaaagttctgctttgacaaactgacaaagtctaaatgagcacatgtatcccagtgagcagtaaatcaatggaacatcccaagaagaggataaggatgcttaaaatggaaatcattctccaacgatatacaaattggacttgttcaactgctggatatatgctaccaataaccccagccccaacttaaaattcttacattcaagctcctaagagttcttaatttataactaattttaaaagagaagtttcttttctggttttagtttgggaataatcattcattaaaaaaaatgtattgtggtttatgcgaacagaccaacctggcattacagttggcctctccttgaggtgggcacagcctggcagtgtggccaggggtggccatgtaagtcccatcaggacgtagtcatgcctcctgcatttcgctacccgagtttagtaacagtgcagattccacgttcttgttccgatactctgagaagtgcctgatgttgatgtacttacagacacaagaacaatctttgctataattgtataaagccataaatgtacataaattatgtttaaatggcttggtgtctttcttttctaattatgcagaataagctctttattaggaattttttgtgaagctattaaatacttgagttaagtcttgtcagccacaa

SEQ ID NO: 2050 - DNA, 1397 bp, Homo sapiens
cggctccgctgcggaaggcggacgactagagtcgttgggcccggcgcgacccgcaggagcgtagagagcgcgggactagagtgcagagctccgggacgtggatcggagccggcgcgatgggcggagagcaggaggaggagcggttcgacggcatgttgctggccatggctcagcagcacgagggcggcgtgcaggagcttgtgaacaccttcttcagcttccttcgacgcaaaacagactttttcattggaggagaagaagggatggcagagaagcttatcacacagactttcagccaccacaatcagctggcacagaagacccggcgggagaagagagcccggcaggaggccgagcggcgggagaaggcggagcgggcggccagactggccaaggaagccaagtcagagacctcagggccccagatcaaggagctaactgatgaagaggcagagaggctgcagctagagattgaccagaaaaaggatgcagagaatcatgaggcccagctcaagaacggcagccttgactccccagggaagcaggatactgaggaagatgaggaggaagatgagaaggacaaaggaaaactgaagcccaacctaggcaacggggcagacctgcccaattaccgctggacccagaccctgtcggagctggacctggcggtccctttctgtgtgaacttccggctgaaagggaaggacatggtggtggacatccagcggcggcacctccgggtggggctcaaggggcagccagcgatcattgatggggagctctacaatgaagtgaaggtggaggagagctcgtggctcattgaggacggcaaggtggtgactgtgcatctggagaagatcaataagatggagtggtggagccgcttggtgtccagtgaccctgagatcaacaccaagaagattaaccctgagaattccaagctgtcagacctggacagtgagactcgcagcatggtggaaaagatgatgtatgaccagcgacagaagtccatggggctgccaacttcagacgaacagaagaaacaggagattctgaagaagttcatggatcaacatccggagatggatttttccaaggctaaattcaactagcccctgttttttcctccctgaactcttggggctgagctgcaaccacccaactttctttcccactcttctctgggacttgtgggcctcagggcttggggcaggcatgggactggcccaggcacacaggtcccggggcatcaggagaaaggctgggtcttgggaccttgtcctccccagttggcctactgttacacattaaaacgatttgcccagctaaaaaaaaaaaaaaaaaaaaaaaaaaaaaaaaaaaaaaaaaaaaaaaaaaaaaaaaaaaaaaaaaaaaaa

SEQ ID NO: 2051 - DNA, 2753 bp, Homo sapiens; identical to SEQ ID NO: 743

SEQ ID NO: 2052 - DNA, 1999 bp, Homo sapiens
tattctaatggagagaaacgcacgtgcacacacacccccctaaacccacacaaatgaaaccccctctgcggagaagccggctacaggaaattgacttaggcacaggaacttgctaatctcttttgtcacattcggattgctcctgctgccccacacacactaacccaaccatcttggggtggactccctgccagcccaactgttgtattttcagttcttccagtgtgaatcagttaatattctcgggaacgagggagaggttgatcctatgaggaaatcaaccacagtgaaaaggcttgggccgcttttgttttcacctgcttttgttgaacaaatttgatttccggagtcagtcattttactgtcaagacatttcttcggcattctgcaacagtttccaacatggctagatccatcagaaactgaagccgtggagaacgctctcggggcctttgccacttcttggagtagaagccgacagagagctgtttggaaacttctccttcacacaccagttgaagactaggctttggaggttttcaaagcagacggtgcttggatgggcagggagaagtaacattctgcaaatcgccgtcagaggtcctgaggacacagacctacctggcttgcattccccttgctgaatggcgtgtgctgcagctgcccactgagggctcttttccctgggattctggacttcagagtaggacagcaggctgggaagatgctgagttccatcaagtgcgtgttggtgggcgactctgctgtggggaaaacctctctgttggtgcgcttcacctccgagaccttcccggaggcctacaagcccacagtgtacgagaacacaggggtggacgtcttcatggatggcatccagatcagcctgggcctctgggacacagccggcaatgacgccttcagaagcatccggcccctgtcctaccagcaggcagacgtggtgctgatgtgctactctgtggccaaccataactcattcctgaacttgaagaacaagtggattggtgaaattaggagcaacttgccctgtacccctgtgctggtggtggccacccagactgaccagcgggagatggggccccacagggcctcctgcgtcaatgccatggaagggaagaaactggcccaggatgtcagagccaagggctacctggagtgctcagcccttagcaatcggggagtacagcaggtgtttgagtgcgccgtccgaactgccgtcaaccaggccaggagacgaaacagaaggaggctcttctccatcaatgagtgcaagatcttctaaaccccaagagacttcacacaacacttatgtatgcaccccaaagactaatggggagagggagggccgggaagccaggaaagcttggtgttttctctgggtacaccccaagcagcgtctccttttggatacagttattgatgaggcttggccactggatgttttcactaactacactctacaagtgaactccttgcccaggccagttagaaaatcccttggggaactgtgatgaatattccatctttgattaaaaaagtgaaatagtctccataattttggacgatgaagtgagtttttcaaagaattccatatttaaagacacattttatttaactaataacaaaatgtattgcttttgtatatatttagttttcacacttggaaaatcttttcctacatcctcgaaaacataaactcctctgtgagtgaaatgcttgtacgaagctctgccatatgtttgtagtgttattattttcacctcaagtagaaagtctgttgaaaccacttggctgctggatttaaatgggtaatcaaatttaaaaatgaccataaatgaatctttgcaatttgttttctacttacctgttattcacagttggatataaaatacagttccataagatatcctaatactgcctaatgattttaaagttatcactatatttttctgaaatgataaaacatcattcatttatttac

SEQ ID NO: 2053 - DNA, 2567 bp, Homo sapiens
ctccggcgcagtgttgggactgtctgggtatcggaaagcaagcctacgttgctcactattacgtataatccttttcttttcaagatgcctgaggaagtgcaccatggagaggaggaggtggagacttttgcctttcaggcagaaattgcccaactcatgtccctcatcatcaataccttctattccaacaaggagattttccttcgggagttgatctctaatgcttctgatgccttggacaagattcgctatgagagcctgacagacccttcgaagttggacagtggtaaagagctgaaaattgacatcatccccaaccctcaggaacgtaccctgactttggtagacacaggcattggcatgaccaaagctgatctcataaataatttgggaaccattgccaagtctggtactaaagcattcatggaggctcttcaggctggtgcagacatctccatgattgggcagtttggtgttggcttttattctgcctacttggtggcagagaaagtggttgtgatcacaaagcacaacgatgatgaacagtatgcttgggagtcttctgctggaggttccttcactgtgcgtgctgaccatggtgagcccattggcaggggtaccaaagtgatcctccatcttaaagaagatcagacagagtacctagaagagaggcgggtcaaagaagtagtgaagaagcattctcagttcataggctatcccatcaccctttatttggagaaggaacgagagaaggaaattagtgatgatgaggcagaggaagagaaaggtgagaaagaagaggaagataaagatgatgaagaaaaacccaagatcgaagatgtgggttcagatgaggaggatgacagcggtaaggataagaagaagaaaactaagaagatcaaagagaaatacattgatcaggaagaactaaacaagaccaagcctatttggaccagaaaccctgatgacatcacccaagaggagtatggagaattctacaagagcctcactaatgactgggaagaccacttggcagtcaagcacttttctgtagaaggtcagttggaattcagggcattgctatttattcctcgtcgggctccctttgacctttttgagaacaagaagaaaaagaacaacatcaaactctatgtccgccgtgtgttcatcatggacagctgtgatgagttgataccagagtatctcaattttatccgtggtgtggttgactctgaggatctgcccctgaacatctcccgagaaatgctccagcagagcaaaatcttgaaagtcattcgcaaaaacattgttaagaagtgccttgagctcttctctgagctggcagaagacaaggagaattacaagaaattctatgaggcattctctaaaaatctcaagcttggaatccacgaagactccactaaccgccgccgcctgtctgagctgctgcgctatcatacctcccagtctggagatgagatgacatctctgtcagagtatgtttctcgcatgaaggagacacagaagtccatctattacatcactggtgagagcaaagagcaggtggccaactcagcttttgtggagcgagtgcggaaacggggcttcgaggtggtatatatgaccgagcccattgacgagtactgtgtgcagcagctcaaggaatttgatgggaagagcctggtctcagttaccaaggagggtctggagctgcctgaggatgaggaggagaagaagaagatggaagagagcaaggcaaagtttgagaacctctgcaagctcatgaaagaaatcttagataagaaggttgagaaggtgacaatctccaatagacttgtgtcttcaccttgctgcattgtgaccagcacctacggctggacagccaatatggagcggatcatgaaagcccaggcacttcgggacaactccaccatgggctatatgatggccaaaaagcacctggagatcaaccctgaccaccccattgtggagacgctgcggcagaaggctgaggccgacaagaatgataaggcagttaaggacctggtggtgctgctgtttgaaaccgccctgctatcttctggcttttcccttgaggatccccagacccactccaaccgcatctatcgcatgatcaagctaggtctaggtattgatgaagatgaagtggcagcagaggaacccaatgctgcagttcctgatgagatcccccctctcgagggcgatgaggatgcgtctcgcatggaagaagtcgattaggttaggagttcatagttggaaaacttgtgcccttgtatagtgtccccatgggctcccactgcagcctcgagtgcccctgtcccacctggctccccctgctggtgtctagtgtttttttccctctcctgtccttgtgttgaaggcagtaaactaagggtgtcaagccccattccctctctactcttgacagcaggattggatgttgtgtattgtggtttattttattttcttcattttgttctgaaattaaagtatgcaaaataaagaatatgccgttttaaaaaaaaaaaaaaaaaaaaaaaaaaaaa

SEQ ID NO: 2054 - DNA, 8048 bp, Homo sapiens
agccgccctggccttcggcgagaactcaggcgagcgcggcgcacgctgctccggagtcccaccgcggaagttgaggccgcggattccgagggcggggtggagaggaatctggaaggacctggacccggtggaacgcactgcgcggacggcgcctgcgtccgcactcagctgttcagccctctttcttcaggctctcccctgaaagccgtccccatgccggtctcttttttctgccttcttgtttccctccggcgagtcagcgcgactgtgaatttccgtttccggcggtgtccatgctgacctgaggagtcgcggctgcgagcaggttagagttacttgttattggtaaatagccactatggaggctaaggaccagaagaaacacagaaagaaaaacagtggacccaaagctgcaaagaaaaagaagcggcttctgcaggatctccagctaggagacgaagaagatgcccggaagagaaatcccaaagcttttgcagttcagtctgctgtgcggatggctcgatcctttcacaggactcaggatttgaagacaaaaaagcatcatattccagtggttgatcgaactccactagagcccccaccaatagtggtagtggtgatgggacctccaaaagttggaaagagcactttgatacaatgcctcattcggaactttacccggcagaagttgactgagatcagaggccctgtgacgattgtgtcaggtaaaaagcgcagactcaccattattgaatgtgggtgtgacattaacatgatgattgatctggctaaagtagcagatctggtactgatgcttatagatgccagctttgggtttgaaatggaaacgtttgagtttctaaacatctgtcaagtacatggctttcctaaaattatgggagttctcacccacctcgactccttcaagcataataagcaactgaagaagacaaagaagcgattaaaacacaggttctggacggaagtttacccgggtgccaagctgttctacctttctggaatggtgcatggagaatatcaaaaccaagaaatccacaatctgggccgttttattacagttatgaagtttaggcctctcacatggcaaacttctcacccttatatcctggcagacaggatggaagatttgacaaacccagaggatatccgaacaaacatcaaatgtgaccggaaggtgtcactttatggttatttaagaggagcacacttgaaaaataaaagccaaattcacatgccaggggtaggagattttgccgtgagtgacatcagtttcctcccagacccttgcgctcttcctgaacaacaaaagaagcgctgtttaaatgagaaggagaagctggtttatgcgcctctttctggagttgggggtgtgctgtatgacaaagacgctgtctatgttgaccttggtggcagccacgtttttcaggatgaagtggggcccacccatgagctggtccagagtctcatctctacccactccaccattgatgccaagatggcttcaagtcgagtgacgctgttttctgattccaagccacttgggtcagaggatatagataatcaagggctaatgatgccaaaggaggaaaaacaaatggacttgaacactggtcgaatgcgtcggaaagccattttcggagatgaagatgaatctggagatagtgatgatgaagaagatgatgaaatgtctgaagatgacgggttggaaaacggctctagtgatgaggaagcagaagaggaggaaaatgctgagatgactgatcagtatatggctgttaagggcatcaaacgacggaaacttgagttggaagaagacagtgaaatggatttgccagcatttgctgacagtgacgatgaccttgagaggagctcagcggaagaaggggaagcggaggaagctgatgaaagcagtgaagaagaggactgcactgcaggagagaagggcatttcaggatcaaaggctgctggagaaggtagtaaagcagggctgtcaccagctaattgccagagtgaccgtgtgaatctggagaagtctttgctgatgaagaaagcagctctccccactttcgattctgggcattgcacagctgaagaggtgtttgcatctgaagatgaatctgaagaaagctcctcactcagtgcagaggaagaagactcagaaaatgaagaggctattagaaaaaagctttcaaagccttctcaagtgagcagtggtcagaaactggggccacagaacttcattgatgagaccagtgatatagaaaatttactcaaagaggaagaagattacaaggaagaaaataatgattccaaagaaacgtcaggtgccctcaagtggaaggaagacctttccagaaaggcagctgaggcctttctgaggcagcagcaagcagctccaaacctccgaaagcttatttatgggacagtgacagaagataatgaagaagaagatgatgatactctagaagagcttggagggttgtttcgtgtcaaccagcctgacagagagtgtaagcacaaggctgactctttggactgctccagatttcttgtggaggccccccatgactgggatttagaggaggttatgaacagtatcagagattgcttcgtgactggaaagtgggaagatgataaagatgcagccaaggtcttagcagaagatgaggagctctacggtgactttgaagacttggaaacaggggacgtgcacaagggaaaatcaggccccaatactcagaatgaagatatagagaaagaagttaaggaagaaattgaccccgacgaagaagaaagtgccaagaaaaagcatttggataagaagagaaaattgaaggagatgtttgatgcagaatatgatgaaggagaaagcacatattttgatgatcttaaaggagaaatgcagaaacaagcacagctgaatcgcgcagaatttgaagatcaagatgatgaagccagagttcagtatgagggttttcgacctgggatgtacgtccgcattgagattgaaaatgttccctgtgaatttgtgcagaactttgacccccattaccccattatcctgggtggcttgggcaacagtgagggaaatgttggctacgtgcagatgcgtctgaagaaacatcgctggtataagaaaatcctcaagtcccgagatccaatcatattttctgtagggtggaggaggtttcagaccatcccactgtattatatcgaagaccacaatggaagacaaaggcttctaaagtataccccacagcacatgcattgcggagcagccttttggggccctatcactccacagggaactggtttcttggcaatacagtctgtcagtggcataatgcctgattttcggatagctgctacaggagttgtccttgatctggataaatccataaaaattgtgaagaaattaaagctaactggttttccatataaaattttcaagaacacttcatttattaagggaatgtttaattctgccttggaagtggccaaatttgaaggtgctgtgattcgaacagtcagtgggataagggggcagatcaagaaagcactccgagctccagaaggagctttcagggccagctttgaggataagctgctgatgagcgatattgtcttcatgcgaacttggtatcctgtttccatcccagcgttctataacccagtaacatctttgttgaaaccagtgggtgagaaagacacctggtcaggaatgcggaccacgggccaactcaggctcgcccatggcgtcagactaaaggcgaacaaggactctctgtataagccaatcctgaggcaaaagaaacattttaattcactgcacattccaaaagccttgcagaaggccctgccatttaagaacaagcccaagacccaagcaaaggcaggcaaggtgccaaaggacaggcggagaccggccgtcatacgcgagcctcatgaaagaaagatccttgcactgctggatgctctgagtacggtgcatagtcagaagatgaagaaggccaaggagcagcggcacctgcacaataaagagcacttcagagccaagcagaaggaggaggaggagaagctgaagcggcagaaggacctcaggaagaagctcttcagaattcaggggcagaaggaaagaagaaaccagaagtccagtttgaagggggctgagggccaattgcagtgagcctttggactggagggactgtccctggatctgcggaggtagacagtttcaaacatcacagtttgaatgcctgtgaatgacaagtcagtgggaaagagctcaagagatgtctctactcaaactgtgcctgcaggaggaggaacagagaagcctgggctgctgggactgggttcattctcatgacttggggctgtcgagatttaaagtgatgtaagctgtggttatgtggattctcttactttcctctgcctgcctcagtttaattattttgtcctacagaaatatcattaaaatatttttttgttacttttggcttagtagttttcattagggatgaatgcctgacaattctttgtggataattatttatactaccaccttcatgaggagtcttccagaagagaaagaaatattcacttgaactctgagctcccatggaagattttagagaatagtgtgtagtgtttttgttttgttttttgtttgagtgacacacaaacctagatggtacagcctactgtgcacccaggatctatgggctcctttgatcactggcccttgtggacattttctatcttatttcatatgttctgcacattagtatagtgacaaggtaacagtaagtacttttttaaagctttagacttaggagattattgtctcaggtgcagagaccaaggaaatcgtatgtatcagtgagataggcttcccgtattatgctcatgcgttatacctgcctagctacattgcctttttttaaattaaacattatgttgaagtaatcatactattacataggcgatgtatgtattttatgattgtatgttgatatagttatggggaatctattcctatacgatgtaatcatagattcacatatagttgtatattttgcccaatttctctcagtggtaatgtttcacacatataacaatcaggatgttgacatcaatacagcccgctgattttattcacatttccccagctttactttccccaacgtatactcctccatgtatgcatgggtgtgtagaaatatggaacgcagctgggcacagtgactcacgcctgtaatcccagcactttgggatgctaaggcaggaggatcacttgagcccaggaatttgagaccaacttgggcaacatggcaaaacctcatcgctacaaaaaataaaaaattcgccaggtgtggtgggtgcacacctgtagttccagctgcttgggaggctgaggtaggaggatcacttgagcttgggaggttgaggctgcagtgagccatgatagcaccactgcactccagcctgggcgacagggcaagaccctgtttcaaaaaaaaaaaattatacatatatgtatgtagaacacttcatgaatttgtgtgtcatctgtgcatggggcccatgctgacctctgtgttgtgccagttatagtatgtgtgctgctgatatgagtgccacattgcctttacaacatcataggggccaaagagggttggcaggattatgagcagttggcctagtctgagaggctctctaaaagcctaaagtctgtaggcaggtgctcagctttgtatctccataagaagggaagaggatgtgaggatcctgtcagggctaggtccacctgggaagtgacaattggaacactcccagacctctctgggcaactctgggtgtacattttcctctgttcctcaagagctattatgaatttcatcatccattatgctgataggcctggggactgacacatagtaagcccataacaattataatttaaaactaatttgttatatagcataattgatatattttaaaatgcaaaactataattcaactaaaatatacaaggcactcaagtcataccatgttttaagtagcttacaaggtgatcagcaagtgtcttatacaacaagcaaatttgttcaaagagaagcattgcaaataagtatttataattgtatagttttatattttagccagaagagtggaatcctttagcaatgggggaaataaaagaatgtttaattacagttgcagataattgccttttccaaagacaatgtatgtaggcagaactcatacctgttaatattaaaaatcttggtttatcatatttggagaacaagggaaataaaaagtttgcatattaagattatttaaactaaagttaaggaatctctaatgtctgaaagaaacaataaatagcatttttcatgtagaatttttattggtgaaggttccacctggccaggttagtaaaatacagtcacacatcagttaaggatggggatatattctgagaaatgtatcattaggcaattttgtcattgtgtaaacatcatagagtgacacacaaacctagatggtacagcctactgtgcacctgggctctatggtatggcctgttgctcctaggctacaaacctgggcagcatgtgactgtactgactactgtaggcagttgtaacacagtggtaaacatttgtgtatcgaaacatagaaaaggcgtagcaaaaatacagtattgtggaaccactgccatatacgtggtccatccttgactgaacatcatgcggcatgtggctgtatgtatacacatagtttttgctgtgagtttgcatccatctcataggaagacatatatcaaaataaggaccagactggagagtgtgtaaattacttttcaatactaatggcttattaatttgatattgtcagcaagtatgttgcaaaaacaaattccaccagaatgtgagttccatgagagcaggaactgggttgttcaccttgttggcacttggagtagagccactgagcttcgtgctgcataaaattgcttggaagaaagaagggagggcattccaggtaactgaagcattgctatgcaaagtaagcatttgccctctgaaatattttaacaatgtttatagaaacctttctcaattgtattaaactttgtaaattgtaaaaattattctgttataccttttctatttactaggcacaggcagccataggtgctaggtatgttttgaaaacatattgaacctacagtgtacatatcattccatgccattaaatattcttatttaatcatagatgtgttcaggtgtgtttggtttcctatttgtggatgtactagattgttttctttttttaacaaaacctgtgaacttgctttaagtattatcatttggtgacatgcccgccatttcagaaataaatgtttgagcaaagaggaaagccaccgggtctgattcagctctctggaggctccagagcttacctcgctgatgggaaaaagagcatcgatttaattgcccttggtaccgacttctagtatctagtattttgccagactcaggtatttcttaaagccattattcagagtcttcagcaaggacattgtattttacttgtgtctccttagttttacctagtttatttcatggttttaaagtattgtacatttttataatcctttaacaagacaaaaggttgagatgttggacatttaaatgccaaaggtgttttattatgagacttagcatttcatatttggggatggtaccttatcgaaaatcagataaactttggttggatgggtatttggaggaatcttttaagtcttttcttaagcaaagtttggacactctaaaataaggttgccaactggcatgtagagagaaaaggatgtgtcatacatttagaccaggtggcctgtcctgtaaatttttttgaggggaggggtgggcttgtttttttctgtgtttcggttttttccaatttttgttttgtgataaaatatgcataataaaacttattttatcaatttttaa

SEQ ID NO: 2055 - DNA, 2174 bp, Homo sapiens; identical to SEQ ID NO: 816

SEQ ID NO: 2056 - DNA, 3606 bp, Homo sapiens; identical to SEQ ID NO: 269

SEQ ID NO: 2057 - DNA, 1308 bp, Homo sapiens
cctccgcctccattgaaggcggggaaataccgcggcgcggacggtagttgctgtggtttccgttctgagctcgcagcttaggagctgaagatcgcggacttagcgttgccgcgtccgagtccggccatcagtggctgcagatccggaggccaggagctcaaccacccttcttcggaacagggccggcctgctgctgtgccctcgacgctcggtgcctgtatctactccggggcctaggtcggctccgggggcggcttaggagaaggccgccggcgagatgttcaaaaacacgttccagagcggcttcctctccatcctctacagcatcggcagcaagcctctgcaaatctgggacaaaaaggtacggaatggccacatcaaaagaatcactgataatgacatccagtccctggtgctagagattgaagggacaaatgtaagcaccacatatatcacatgccctgcagaccccaagaagacgctgggaattaaacttcctttccttgtcatgattatcaaaaacctgaagaagtattttaccttcgaagtgcaggtactagatgacaagaatgtgcgtcgtcgctttcgggcaagtaactaccagagcaccacccgggtcaaacccttcatctgcaccatgcccatgcggctggatgacggctggaaccagattcagttcaacttgctagacttcacacggcgagcatacggcaccaattacatcgagaccctcagagtgcagatccatgcaaattgtcgcatccgacgggtttacttctcagacagactctactcagaagatgagctgccggcagagttcaaactgtatctcccagttcagaacaaggcaaagcaataactggaattgtgactcgagggatagacccctggatgtgactcttctttttaaaaggaaactatgtggaggacgatgcaaaaacatatttatcttagtttgctctgctgtagttctgttatttatacttggtgttgcttgtcatggacaccggtgaacatgccgtaactctgtgactgcattgtaagtgcagtgggggtaagcagtcctgtgagtggcgcatgaacgctggagcttattccgccgcctgccccagtgtggggggagatacctttaccatgaacttacagaattaaagatggcccataaggaattccagaccaatatttcttcctgcggtttattctatgttttatatattatctaaatatatgtatatgctgtgtcatactcataatctggaaatgaataaagtgatatattcctggtttgtaaaaaaaaaaaaaaaaaaa

SEQ ID NO: 2058 - DNA, 6203 bp, Homo sapiens
aacagaatcgcgtttggctgtgctggatgtgtgaacctattgggtactgtacaacttcaagcctcgaaatcagataggcaccaccaacctcatttcctgtttcaccttgattttctgtgataccaaaatctcagcttcacaaagtcattgaaagtgttggttcatgaagttttaccatcaattcaagtaatcataaatggcaaattctgcaaaagcagaagaatatgaaaagatgtctcttgaacaggcaaaagcgtcagtgaattctgaaacagagtcttcattcaatattaatgaaaacacaacagcttctgggactgggctttctgaaaagacttctgtctgtaggcaagtagacatagcaagaaagagaaaagagtttgaagatgatcttgtaaaggaaagttctagttgtgggaaagacactccatccaagaagagaaaacttgatcctgaaattgtcccagaggaaaaagattgtggtgatgctgaaggcaattcaaagaaaagaaaaagagaaactgaggatgttccaaaagataaatcttctactggagatggcactcaaaataagagaaaaatagcacttgaggatgttcctgaaaagcagaaaaatctggaagaaggacacagctcaacagtggctgcccattacaatgaacttcaggaagttggtttggagaagcgtagtcaaagtcgtattttttacctaagaaactttaataattggatgaaaagtgttctcattggagaatttttggaaaaggtacgacagaagaaaaaacgtgatatcactgttttggacctgggatgtggtaaaggtggagatttgctgaaatggaaaaaaggaagaattaacaagctagtttgtactgatattgccgatgtttctgtcaaacagtgtcagcagcggtatgaggacatgaaaaatcgtcgtgatagtgaatatattttcagtgcagaatttataactgctgacagctcaaaggaacttctgattgacaaatttcgtgacccacaaatgtgttttgacatctgcagttgtcagtttgtctgtcattactcatttgagtcttatgagcaggctgacatgatgctgagaaatgcgtgtgagagacttagccctgggggctattttattggtactactcccaatagctttgaattgataagacgccttgaagcttcagaaacagaatcatttggaaatgaaatatatactgtgaaatttcagaagaaaggagattatcctttatttggctgcaaatatgacttcaacttggaaggtgttgtggatgttcctgaattcttggtctattttccattgctaaatgaaatggcaaagaagtacaatatgaaactagtctacaaaaaaacatttctggaattctacgaagaaaagattaagaacaatgaaaataaaatgctcttaaaacgaatgcaggccttggagccatatcctgcaaatgagagttctaaacttgtctctgagaaggtggatgactatgaacatgcagcaaagtacatgaagaacagtcaagtaaggttacctttgggaaccttaagtaaatcagaatgggaagctacaagtatttacttggtgtttgcctttgagaaacagcagtgagcacataggcagtagtcccagaggggccgtgttctgtcctgcacaaatttgaacaactcatctcgatatatttgatatttctctgtctgttgattttaattctaaatgtgcaggatgctgccagaaactccaatgtagaaattcaacatttgctgtctgtgacagatgaacttttgcatgtgtatataagaatgagttgggacctctgtctttaaaaatctatttttaggtaatgttctaagaattccatttgcctctatgatcttagctcataaaaatataatatgacttgataaagcaactaaactcttcccacagtgttcagatttgtcctgtgtgtgtttacagtattcaatttattgcagttatagaattggtcagagagcattttcatagtgtgctcatttctatggttttgttatatagcatttttcaacatttaatggtctgtacagttgaatgtaagtgttcaatatgtattgctgaagttataagtttaaaactcaatttcagatgctcataaaagttacttagctaaaattttagcaatttattgcattttgaaataatcattaacatgctgcaattcaggagctggttagaacattttaagtggcagcatagaattttggaattttggggctttcttttcagaaattgctaccatagtaattaatgtttccagttatcaagattgtgattagacacatttacctttcttcattgaacaaatggtgccatagttatttttctcaaaatttagtgaaaatccctcccatgtagacatgttgcacattttttccaaatttatacatggaactgcagtaggaatattctcaccatctgatgccatgtacccacttcagaaataagcaatacttgttcctctgttacaacctcagcactttgcaccgtaggagccattgttaaagttgtcacttgtgtaactgactgcttttccaaaactggtacttacgtgaactgttgtccttgctttacaccaccatttggaaaacttaccagtttttagatgtagatgtagtgaaaaacttcaagaatgaagcagagcaattgagtattcttttttaaattattaagccatgatttacaaaaacattactttctgtaattcacaatacttgttttaaaaacatagtgtcttcattagtgtgcatctattaactgttcatggtgttagagttgcaaactttttagcaagaaaatatggatttcctcatttcagttccttctgcagcctgtgaatctccacaaagtgttaccagtttacaaaaataagtctttttgccttaagtcattttggaaataagtaatactgcatctgactctggtggctgtattagctaggaaaggtttgtaaatggtgtcagtgaggtggggaaaggaagtcttcctgtcacatatgcaggttcgttttcattctagggcagtgccaggaagtatattgatagctttgtaggtacaggaaaaacatcatcattatttcctctgttcacatttactggtcttaattaacaggtaataataatacatgtacttttagcctgaaacctcttccacgccatgggtaacttgggggagagaagaatcctccaaacgatggagtagccagtggtaatacaaagcagggagaacagaaaggtagagttactaaggccttcagtgaacagaaaggagcagagagcaagattagatctgagaagatgctctggggactgagcccactgttgttggtgtcagggaggcttactggagccacacctgcaggcgctgtgttcaggcaccaccttcctccttgagctttgcctgtctcttgccttatcagttcttcctccaccaccctacacccccctccccccggccccaagcccctgtgtctccttgttacaattaagtttctggatattgacttaagaactgttaggaagaggactagaaaaggcttcccctgcctatcctctccgatcaccaaggtggaagggagctagtaggactcttccttgacacaccttgtagtctaaatgttcggtattctattcaggacttacggtaactattatgagggaggcatggctttccaccgtcgggccaggaagagcacctgttgctgcaagctcagtgaagtggggcactcccagacctgccatgcagtttatcctctgagaatggaattggaaatgaagacctaaccagctattggtgggaatgacggaactggggattgcgatgattgatctgggaacatggctggattgtgatttaaccaagaatgctgatgttgaattctttgggcctagaatatacttgagaaagcactagtggcttgtgttcagggagaggagctggcagtttttaaccacttctgtgggagccgtgttctaacctgtggaaagtattgcaattctgtgagagtgactctgcagagtcactgcaccatcaggcttggccctgctgtgccttcagtacccagccaggttctctgggtccagggtgactctccaaagaaattggccttcagctggagaaaacattgggtggagactctcacttatgttaatgcaatcttgaaatgactgaaaggtagattgccagcacagtgagtttcccagcctgctcccccatccacacttggaaattgagggagcatgaccgctctctgacttcacatgttaatagaggatcagagcagagttgggagtatattggtcaggatcatagaaaagaagacaaagcttgctcagccatgagatggccaggtatccagttttgttaactctctttgggaatttctttttcagcctgttttttagcttagtgccattatgtcattttgatttgtattcaagtactcttcaagtatctttgtaatgaaggtttggctacttgtataggtctgcctgcagggtgaaaatgccagtgtgaatattctagctaccaaacattgttttttgttgaaaaactgactttctgttgtctacctcaggccttgtgcatttgggttatctcaagccagtcaccacagagggtctctagggtctgcaaaatagaggccaaatccagggaccaggccctaataatagaagttgtaccaaaatgcctgtggtacttgatggcctgttggtcaaataggaagtacaagtgtgtgatgttagaacctccctagttgctgctatatcaaacactgcacacttgacaagtgttttcattccccgccctctgacagaacaacattcctaattctttgaaggcaaccagtgcaaaggctactacacttgtgtaatgatatttagcagatgcatacaggactggatcccagggcactgtcagttcttccctccctctcgtgctgctcagtttgtcctctgctcccatgtaggcctaaagtcaccccactccttagtgcctgcacctcaccacgatattgaggaagcacaggacatccaagggtactctccagtttggctgtggagacttgagcaagccctaaagtcccctgctccctggacttctcctgggttgtgcttttttgggggcaacataccttggacaaagctgagctgacagctaatgtttattagcctcctacctaagtcagtcactttgctaaattcttcacctgtggtaactcattttgattgttataacatctcagcaccattattcccattttaatgatgaggaaactgagtcatagaggatacagacttgcccaaaggagagccaggattttcacaccccctcctcaagctgggcctgccctccaagtgcttgttatatacctccacgggtgtcagcccagatgactcctcacccatccaccacctgcagcttgagatgttaactattagagctccattcttttggttcaaaacgttgatacttacttagatgttccctgagaggagtgtttatttctgagtaaggggctttgttgaaagagggggttagagagagcaagacagcacttgagtgcactggcaggaagcagagataagacttgaatttcagtttggtagaccaccttctttagcagcccaacctgtagcaaatctagtttagcctgcatggcagggagagggattctcttcccaccctcaccatttgcaagtggcaggagctgagaatgccagtacgagagtgtagccaaagtgagaggctgagagcaaaggagacatttttttcagttttgagtcgagtatccagacagaggcaaatcattttgtttaactttttattaaagtgtaactatagaaacacatcaatgatttttcacaagtggagcacgtgcatacaatcggcaccccagaagccccccgtcagattcccttccagttaactacctctccaagggaaaccactatcctgagttctaagcgcatagattagttctgtctggtttggggagatatataaatggaattatgcattcttcgtatctggtttcttttcaccaatattatgtttgtgagatttttgttgcatgtatttgtacatggattttcattctcatggttgtataatatttcattgtgtgaataaaccacatactgtttatctg

SEQ ID NO: 2059 - DNA, 3434 bp, Homo sapiens
gcccggaacgcccgcgggctaggccacaacggctcgggaaccgccgccggtatccgcgtccgcagcgccgccagccaggcgagagccgtgtgggatcccagcgcccgcactcccgcccccgccaaggagccaggaatggcacaactagagaggagcgccatctctggcttcagctctaagtccaggcgaaactcattcgcatatgatgttaagcgtgaagtatacaatgaggagacctttcaacaggaacacaaaaggaaggcctcctcttctgggaacatgaacatcaacatcaccaccttcagacaccacgtccagtgccgctgctcatggcacaggttcctacgatgcgtgcttacaatctttcccttcctagaatggatgtgtatgtatcgattaaaggattggcttctgggagacttacttgctggtataagtgttggccttgtgcaagttccccaaggcctgacacttagtttgctggcaaggcaactgattcctcctctcaacatcgcttatgcagctttctgttcttcggtaatctatgtaatttttggatcgtgtcatcaaatgtccattggttccttcttcctggtgagtgctctgctgatcaacgttctgaaagtgagcccattcaacaacggtcaactggtcatgggatctttcgtcaagaatgagttttcggccccctcctaccttatgggctataataaatccttgagtgtggtggcaaccacaacttttctgactgggattattcagctaataatgggcgtattgggtttgggcttcattgccacttaccttccggagtctgcaatgagtgcttacctggctgctgtggcacttcatatcatgctgtcccagctgactttcatctttgggattatgattagtttccatgccggtcccatctccttcttctatgacataattaattactgtgtagctctcccaaaagcgaattccaccagcattctagtatttctaactgttgttgttgctctgcgaatcaacaaatgtatcagaatttctttcaatcagtatcccattgagtttcccatggaattatttctgattattggcttcactgtgattgcaaacaagataagcatggccacagaaaccagccagacgcttattgacatgattccttatagctttctgcttcctgtaacaccagatttcagccttcttcccaagataattttacaagccttctccttatctttggtgagctcctttctgctcatatttctgggcaagaagattgccagtcttcacaattacagtgtcaattccaaccaggatttaatagccatcggcctttgcaatgtcgtcagttcatttttcagatcttgtgtgtttactggtgctattgctaggactattatccaggataaatctggaggaagacaacagtttgcatctctggtaggcgcaggtgtgatgctgctcctgatggtgaagatgggacactttttctacacactgccaaatgctgtgctggctggtattattctgagcaacgtcattccctaccttgaaaccatttctaacctacccagcctgtggaggcaggaccaatatgactgtgctctttggatgatgacattctcatcttcaattttcctgggactggacattggactaattatctcagtagtttctgctttcttcatcaccactgttcgttcacacagagctaagattcttctcctgggtcaaatccctaacaccaacatttatagaagcatcaatgattatcgggagatcatcaccattcctggggtgaaaatcttccagtgctgcagctcaattacatttgtaaatgtttactacctaaagcataagctgttaaaagaggttgatatggtaaaggtgcctcttaaagaagaagaaattttcagcttgtttaattcaagtgacaccaatctacaaggaggaaagatttgcaggtgtttctgcaactgtgatgatctggagccgctgcccaggattctttacacagagcgatttgaaaataaactggatcccgaagcatcctccattaacctgattcactgctcacattttgagagcatgaacacaagccaaactgcatccgaagaccaagtgccatacacagtatcgtccgtgtctcagaaaaatcaagggcaacagtatgaggaggtggaggaagtttggcttcctaataactcatcaagaaacagctcaccaggactgcctgatgtggcggaaagccaggggaggagatcactcatcccttactcagatgcgtctctactgcccagtgtccacaccatcatcctggatttctccatggtacactacgtggattcacgggggttagtcgtattaagacagatatgcaatgcctttcaaaacgccaacattttgatactcattgcagggtgtcactcttccatagtcagggcatttgagaggaatgatttctttgacgctggcatcaccaagacccagctgttcctcagcgttcacgacgccgtgctgtttgccttgtcaaggaaggtcataggctcctctgagttaagcatcgatgaatccgagacagtgatacgggaaacctactcagaaacagacaagaatgacaattcaagatataaaatgagcagcagttttctaggaagccaaaaaaatgtaagtccaggcttcatcaagatccaacagcctgtagaagaggagtcggagttggatttggagctggaatcagaacaagaggctgggctgggtctggacctagacctggatcgggagctggagcctgaaatggagcccaaggctgagaccgagaccaagacccagaccgagatggagccccagcctgagactgagcctgagatggagcccaaccccaaatctaggccaagagctcacacttttcctcagcagcgttactggcctatgtatcatccgtctatggcttccacccagtctcagactcagactcggacatggtcagtggagaggagacgccatcctatggattcatactcaccagagggcaacagcaatgaagatgtctaggagatgaactagaaataaggggtcagataatgctggcaaatcctcctacccaaaaaggggtcaattgtccagagacctagactggatacgaactagcagtacttccttcctgactgtgactcctactacctgccagccttcttccttgctctgcgctgggatcatactcccaaatcacattactaaatgccaacaattatctctgaattccctatccaggctcccctcatttcaccttcagcatatattctagtcatgaatttccttcttcacacaccccacatctctgggctttgtgccagaccatctctaacttaatcctctcatccctgttcccctttctccaaagagatgaagctcaaataaaatgtataactctagtaaca

SEQ ID NO: 2060 - DNA, 2094 bp, Homo sapiens
gcgcggatcttgcatctgaaactgagcagagcagggcgccgggcagggccggcgggccacgtgataagcccggaaacagctccgccccctcgcttcctgagccgccacatcccggcagccctcctacctgcgcacgtggtgccgccgctgctgcctcccgctcgccctgaacccagtgcctgcagccatggctcccggccagctcgccttatttagtgtctctgacaaaaccggccttgtggaatttgcaagaaacctgaccgctcttggtttgaatctggtcgcttccggagggactgcaaaagctctcagggatgctggtctggcagtcagagatgtctctgagttgacgggatttcctgaaatgttggggggacgtgtgaaaactttgcatcctgcagtccatgctggaatcctagctcgtaatattccagaagataatgctgacatggccagacttgatttcaatcttataagagttgttgcctgcaatctctatccctttgtaaagacagtggcttctccaggtgtaactgttgaggaggctgtggagcaaattgacattggtggagtaaccttactgagagctgcagccaaaaaccacgctcgagtgacagtggtgtgtgaaccagaggactatgtggtggtgtccacggagatgcagagctccgagagtaaggacacctccttggagactagacgccagttagccttgaaggcattcactcatacggcacaatatgatgaagcaatttcagattatttcaggaaacagtacagcaaaggcgtatctcagatgcccttgagatatggaatgaacccacatcagacccctgcccagctgtacacactgcagcccaagcttcccatcacagttctaaatggagcccctggatttataaacttgtgcgatgctttgaacgcctggcagctggtgaaggaactcaaggaggctttaggtattccagccgctgcctctttcaaacatgtcagcccagcaggtgctgctgttggaattccactcagtgaagatgaggccaaagtctgcatggtttatgatctctataaaaccctcacacccatctcagcggcatatgcaagagcaagaggggctgataggatgtcttcatttggtgattttgttgcattgtccgatgtttgtgatgtaccaactgcaaaaattatttccagagaagtatctgatggtataattgccccaggatatgaagaagaagccttgacaatactttccaaaaagaaaaatggaaactattgtgtccttcagatggaccaatcttacaaaccagatgaaaatgaagttcgaactctctttggtcttcatttaagccagaagagaaataatggtgtcgtcgacaagtcattatttagcaatgttgttaccaaaaataaagatttgccagagtctgccctccgagacctcatcgtagccaccattgctgtcaagtacactcagtctaactctgtgtgctacgccaagaacgggcaggttatcggcattggagcaggacagcagtctcgtatacactgcactcgccttgcaggagataaggcaaactattggtggcttagacaccatccacaagtgctttcgatgaagtttaaaacaggagtgaagagagcagaaatctccaatgccatcgatcaatatgtgactggaaccattggcgaggatgaagatttgataaagtggaaggcactgtttgaggaagtccctgagttactcactgaggcagagaagaaggaatgggttgagaaactgactgaagtttctatcagctctgatgccttcttccctttccgagataacgtagacagagctaaaaggagtggtgtggcgtacattgcggctccctccggttctgctgctgacaaagttgtgattgaggcctgcgacgaactgggaatcatcctcgctcatacgaaccttcggctcttccaccactgattttaccacacactgttttttggcttgcttatgtgtaggtgaacagtcacgcctgaaactttgaggataactttttaaaaaaataaaacagtatctcttaatcactggatccatagttaaaaaaaaaa

SEQ ID NO: 2061 - DNA, 1081 bp, Homo sapiens
aacacatccaggctccttaagagaaagcctttctttaaccatttttgaaacccttcaaaggcagagacttgtccagcctaacctgcctgctgctcctagctcctgaggctcagggcccttggcttctgtcgctctgctcagggccctccagcgtggccactgctcagccatgctcctgctgctcgtcccagtgctcgaggtgatttttaccctgggaggaaccagagcccagtcggtgacccagcttggcagccacgtctctgtctctgaaggagccctggttctgctgaggtgcaactactcatcgtctgttccaccatatctcttctggtatgtgcaataccccaaccaaggactccagcttctcctgaagtacacatcagcggccaccctggttaaaggcatcaacggttttgaggctgaatttaagaagagtgaaacctccttccacctgacaaaaccctcagcccatatgagcgacgcggctgagtacttctgtgctgtgagtgatctcgaaccgaacagcagtgcttccaagataatctttggatcagggaccagactcagcatccggccaaatatccagaaccctgaccctgccgtgtaccagctgagagactctaaatccagtgacaagtctgtctgcctattcaccgattttgattctcaaacaaatgtgtcacaaagtaaggattctgatgtgtatatcacagacaaaactgtgctagacatgaggtctatggacttcaagagcaacagtgctgtggcctggagcaacaaatctgactttgcatgtgcaaacgccttcaacaacagcattattccagaagacaccttcttccccagcccagaaagttcctgtgatgtcaagctggtcgagaaaagctttgaaacagatacgaacctaaactttcaaaacctgtcagtgattgggttccgaatcctcctcctgaaagtggccgggtttaatctgctcatgacgctgcggctgtggtccagctgagatctgcaagattgtaagacagcctgtgctccctcgctccttcctctgcattgcccctcttctccctctccaaacaga

SEQ ID NO: 2062 - DNA, 519 bp, Homo sapiens
ccatgtaaagatttcagtttattccattaaaaaaaaaaaacacacaaaacacctactggaattacacttaacaatggcgccctctagtgggccactgcaaggaaataatcaccaataattgcttttagataagacttttgtgttagttccacttaataggtaatcaccattcagcagatactggatgaacagcatgggctggcaggctgggagacaccaagtgaggagggtaaataagctgacatatggccctggggaaaaccaaacccagctactcaggaggctgaggcaggaagattggctgagcccaagtctatagtgagccatggtcatgccagtgtactgcagcctggattacagagaccttgtctcttaaaaaaacaaaaccaaacttgactcagactcccactctttgccattcccttctctccagagatatacagcctggataacctcaaaaacatgacaggtcgatccatctaaagctgcaacacagcctatagaatattcaattgtctg

SEQ ID NO: 2063 - DNA, 4467 bp, Homo sapiens
cgagactcagattgtctgaattgagctatcgcaacttaatgctaaaagctccttaaagctacagatttatgacatagttccttccaaaatattacatcataaatcattgagaagattaaaaaaaaacacttgaagaaattgtagttttaaacatctctgcatatattttggatagctactaggttactttaactgtcattaaggagcacagacttactgaagctttactggacagaatcctgggaaatcgatatcattataaggttatatttcccagttagcgggtgaagggctggagaccttattgcagtcatggctttcacaaattacagcagtctgaatcgagctcagctaacctttgaatatctgcacacaaattcgtaagtatcctctaggtgccactgaggtaaccagtaactcgttccttgatattatatggaaatcgtttccccagaaaattttgctttttcactttttgagatgtatcccactggagtgaaatgtgtcactggatatcttgagctctgtattgaagaactgagatcagtgaaatacttgttgctaatccagaagaatctgatttttgtttattggatcaaaattttctaaatgcaaactttagttatttgaagtcaatatgttgagttgtttcattcaagtgtttataggaatccaacaaatactgctctattggatcgccaaatgttggactattttagtatcaaccgtttcccctctgtagtgacaacgtcctaaacagttaggtttataacaagtgtttactttctaacaagaaaacagaagacatttaaatgacaactttcaagaagaaaatttttattttttcagaagttggcattatcttcctggcagattgctcacatccaatattatttgtatatgctaaacaggaaacggcaacttgtttatatctctatttagatagtctttccccaaaatttccacagaaacatacagtgttcatggttcttgagttcatgaaggagtaatctaatcactccaacatggtctggaatgtttcaggtttaatccatatgcccactctcttggaggctgtccagtagcgtcaaaactttagtgttttaatacattcacctgttacttttgagatgaagttcacctttcttggatcacatgcaaaggatgtttaggtctgtgaagaaaagaatttctaggccgggtgctgtggctcacgcctgtaatcccagcactttgggaggccgagaaccactcacgaattcttgtttggtgctcttgctgaactggttgataatgcaagagatgctgatgccaccagaatagatatttatgcagaaagacgagaggaccttcgaggaggatttatgctttgctttttggatgatggagcaggaatggatccaagtgatgctgccagtgtgatccagtttgggaagtcggccaagcgaacacctgagtctactcagattgggcagtacgggaatgggttaaaatcgggctcaatgcgcattgggaaggattttatcctgttcaccaagaaggaagacaccatgacgtgcctcttcctgtctcgcacgtttcatgaggaagaaggcattgatgaagtgatagtcccactgcccacctggaatgctcggacccgggaacctgtcacagacaatgtagagaaatttgccattgagacagaactcatctataagtactctccattccgcactgaggaggaagtgatgacccagtttatgaagattcctggggacagcggaacattggtgatcatcttcaatctcaaactcatggataatggagagccagaactagacataatctcaaatccaagagatatccagatggcagagacgtccccagagggcacgaagccagagcggcgctcgttccgtgcctatgccgctgtgctctatattgatccccggatgaggatcttcatccatgggcacaaggtgcagaccaagaggctctcctgctgcctgtacaagcccaggatgtacaagtacacgtcaagccgtttcaagacccgtgcggagcaggaggtgaagaaagcagagcacgtagcaaggattgctgaagagaaggcgcgggaggcagagagcaaagctcggacattagaagtacgcctaggtggagacctcacgcgggactccagggtgatgttgcgacaggtccagaacagagccatcactctgcgcagagaagccgatgtcaagaagaggatcaaggaggccaagcagcgagcacttaaagaacctaaggaactgaattttgtttttggtgtcaacattgaacaccgggatctggatggcatgttcatctacaactgtagccgactgatcaaaatgtatgagaaagtgggcccacagctggaagggggcatggcatgtggcggggttgttggggttgttgatgtgccctacctggtcctggagcctacacacaacaaacaggactttgctgatgccaaggagtaccggcacctgctccgagcaatgggggagcacctggcgcagtattggaaggatattgccatcgcccagaggggaatcatcaagttctgggatgagtttggctacctctctgccaactggaaccagcccccgtccagtgagctgcgttacaaacgccggagagctatggaaatccccaccaccatccagtgcgatttgtgtctgaaatggagaaccctccccttccagctgagttctgtggaaaaagattaccctgacacctgggtttgctccatgaaccctgatcctgaacaggaccggtgtgaggcttctgaacaaaagcagaaggttcccctgggaacattcagaaaggacatgaagacgcaggaagagaagcagaaacaactgacagagaaaattcgccagcagcaggagaagctggaggcccttcagaaaaccacacccatccgctcccaagcagacctgaagaaattgcccttggaagtgaccaccagaccttccactgaggaacctgtgcgtagacctcagcgtcctcggtcgccccctttacctgctgtgatcaggaacgcccccagcagacccccttctttgccaactcctagaccagccagccagccccgaaaggctcctgtcatcagcagtaccccaaagctccctgctttggcagcccgggaggaggccagcacatctaggctgctccagccacctgaggcaccccgaaagcctgccaacactctcgtcaagactgcatcccgacctgcccctctggtgcagcaactgtcaccatctttactgcccaactccaagagccctcgggaggttccttctcccaaagtcatcaagactccagtggtgaagaagacagagtcacccatcaaactctccccggctacccctagtcggaagcggagtgtcgcagtttctgatgaggaagaagttgaggaggaagctgagaggaggaaggagaggtgcaagcggggcagatttgttgtgaaggaggaaaagaaggactcgaatgagctctcagacagtgctggggaagaggactcggctgacctcaagagagctcagaaagataaagggctgcacgtggaggtgcgtgtgaacagggagtggtacacgggccgtgtcacagccgtggaggtgggcaagcatgtggtgcggtggaaggtgaagtttgactacgtgcccacagacacgacaccaagagaccgctgggtggagaaaggcagtgaggatgtgcggctgatgaaacccccttctccggaacatcagagccttgatacacaacaggagggcggggaggaggaggtgggccctgtggcccagcaggccatagctgtcgcagagccctccacttccgaatgcctccgcattgagcctgacaccactgccctgagcaccaatcacgagaccatcgacctgcttgtccagatcctccggaattgtttacggtacttcctgcctccaagtttccccatctccaagaagcagctgagtgctatgaattcagatgagctaatatcttttcctctgaaggagtacttcaagcaatatgaagtagggctccaaaacctgtgcaattcctaccagagccgtgctgactcccgggccaaggcctccgaggaaagcctgcgcacctccgagaggaagctccgcgagacggaggagaagctgcagaagctgaggaccaacatcgtggcactcctgcaaaaggtgcaggaggacatagacatcaacacagatgatgagctggacgcctacattgaggacctcatcaccaagggggactgaaggcaggagagagagcagctcccctgcccacctgcccctcaaccctgtagctgcagggggaggggacttcattcatgggttggtggtcgcaccttggtttgacttacacgggacatttgtgtttttggaggaaaagataccctgattctttgaatcttccttaagtttataaatatttattttttaaaag

SEQ ID NO: 2064 - DNA, 1269 bp, Homo sapiens; identical to SEQ ID NO: 199

SEQ ID NO: 2065 - DNA, 4184 bp, Homo sapiens
atttaagggcccgcctctcctggctcacagctgcttgctgctccagccttgccctcccagagctgccggacgctcgcgggtctcggaacgcatcccgccgcgggggcttcggccgtggcatgggcgccgcgggcctgctcggggttttcttggctctcgtcgcaccgggggtcctcgggatttcttgtggctctcctccgcctatcctaaatggccggattagttattattctacccccattgctgttggtaccgtgataaggtacagttgttcaggtaccttccgcctcattggagaaaaaagtctattatgcataactaaagacaaagtggatggaacctgggataaacctgctcctaaatgtgaatatttcaataaatattcttcttgccctgagcccatagtaccaggaggatacaaaattagaggctctacaccctacagacatggtgattctgtgacatttgcctgtaaaaccaacttctccatgaacggaaacaagtctgtttggtgtcaagcaaataatatgtgggggccgacacgactaccaacctgtgtaagtgttttccctctcgagtgtccagcacttcctatgatccacaatggacatcacacaagtgagaatgttggctccattgctccaggattgtctgtgacttacagctgtgaatctggttacttgcttgttggagaaaagatcattaactgtttgtcttcgggaaaatggagtgctgtcccccccacatgtgaagaggcacgctgtaaatctctaggacgatttcccaatgggaaggtaaaggagcctccaattctccgggttggtgtaactgcaaactttttctgtgatgaagggtatcgactgcaaggcccaccttctagtcggtgtgtaattgctggacagggagttgcttggaccaaaatgccagtatgtgaagaaattttttgcccatcacctccccctattctcaatggaagacatataggcaactcactagcaaatgtctcatatggaagcatagtcacttacacttgtgacccggacccagaggaaggagtgaacttcatccttattggagagagcactctccgttgtacagttgatagtcagaagactgggacctggagtggccctgccccacgctgtgaactttctacttctgcggttcagtgtccacatccccagatcctaagaggccgaatggtatctgggcagaaagatcgatatacctataacgacactgtgatatttgcttgcatgtttggcttcaccttgaagggcagcaagcaaatccgatgcaatgcccaaggcacatgggagccatctgcaccagtctgtgaaaaggaatgccaggcccctcctaacatcctcaatgggcaaaaggaagatagacacatggtccgctttgaccctggaacatctataaaatatagctgtaaccctggctatgtgctggtgggagaagaatccatacagtgtacctctgagggggtgtggacaccccctgtaccccaatgcaaagtggcagcgtgtgaagctacaggaaggcaactcttgacaaaaccccagcaccaatttgttagaccagatgtcaactcttcttgtggtgaagggtacaagttaagtgggagtgtttatcaggagtgtcaaggcacaattccttggtttatggagattcgtctttgtaaagaaatcacctgcccaccaccccctgttatctacaatggggcacacaccgggagttccttagaagattttccatatggaaccacggtcacttacacatgtaaccctgggccagaaagaggagtggaattcagcctcattggagagagcaccatccgttgtacaagcaatgatcaagaaagaggcacctggagtggccctgctcccctgtgtaaactttccctccttgctgtccagtgctcacatgtccatattgcaaatggatacaagatatctggcaaggaagccccatatttctacaatgacactgtgacattcaagtgttatagtggatttactttgaagggcagtagtcagattcgttgcaaagctgataacacctgggatcctgaaataccagtttgtgaaaaaggctgccagtcacctcctgggctccaccatggtcgtcatacaggtggaaatacggtcttctttgtctctgggatgactgtagactacacttgtgaccctggctatttgcttgtgggaaacaaatccattcactgtatgccttcaggaaattggagtccttctgccccacggtgtgaagaaacatgccagcatgtgagacagagtcttcaagaacttccagctggttcacgtgtggagctagttaatacgtcctgccaagatgggtaccagttgactggacatgcttatcagatgtgtcaagatgctgaaaatggaatttggttcaaaaagattccactttgtaaagttattcactgtcaccctccaccagtgattgtcaatgggaagcacacaggcatgatggcagaaaactttctatatggaaatgaagtctcttatgaatgtgaccaaggattctatctcctgggagagaaaaaattgcagtgcagaagtgattctaaaggacatggatcttggagcgggccttccccacagtgcttacgatctcctcctgtgactcgctgccctaatccagaagtcaaacatgggtacaagctcaataaaacacattctgcatattcccacaatgacatagtgtatgttgactgcaatcctggcttcatcatgaatggtagtcgcgtgattaggtgtcatactgataacacatgggtgccaggtgtgccaacttgtatcaaaaaagccttcatagggtgtccacctccgcctaagacccctaacgggaaccatactggtggaaacatagctcgattttctcctggaatgtcaatcctgtacagctgtgaccaaggctacctgctggtgggagaggcactccttctttgcacacatgagggaacctggagccaacctgcccctcattgtaaagaggtaaactgtagctcaccagcagatatggatggaatccagaaagggctggaaccaaggaaaatgtatcagtatggagctgttgtaactctggagtgtgaagatgggtatatgctggaaggcagtccccagagccagtgccaatcggatcaccaatggaaccctcccctggcggtttgcagatcccgttcacttgctcctgtcctttgtggtattgctgcaggtttgatacttcttaccttcttgattgtcattaccttatacgtgatatcaaaacacagagcacgcaattattatacagatacaagccagaaagaagcttttcatttagaagcacgagaagtatattctgttgatccatacaacccagccagctgatcagaagacaaactggtgtgtgcctcattgcttggaattcagcggaatattgattagaaagaaactgctctaatatcagcaagtctctttatatggcctcaagatcaatgaaatgatgtcataagcgatcacttcctatatgcacttattctcaagaagaacatctttatggtaaagatgggagcccagtttcactgccatatactcttcaaggactttctgaagcctcacttatgagatgcctgaagccaggccatggctataaacaattacatggctctaaaaagttttgccctttttaaggaaggcactaaaaagagctgtcctggtatctagacccatcttctttttgaaatcagcatactcaatgttactatctgcttttggttataatgtgtttttaattatctaaagtatgaagcattttctggggttatgatggctttacctttattaggaagtatggttttattttgatagtagcttcctcctctggtggtgttaatcatttcatttttacccttacttggtttgagtttctctcacattactgtatatactttgcctttccataatcactcagtgattgcaatttgcacaagtttttttaaattatgggaatcaagatttaatcctagagatttggtgtacaattcaggctttggatgtttctttagcagttttgtgataagttctagttgcttgtaaaatttcacttaataatgtgtacattagtcattcaataaattgtaattgtaaagaaaacatacaaaaaaaaaaaaaaaa

SEQ ID NO: 2066 - DNA, 2554 bp, Homo sapiens
cacaatcacttccgccgccgcagtcgccgcccgccccgctgctgtctggcgggggaggagctcgggaccgggagcagcggctctggcggtcgtggcggtcggagatccgagagctctgcttctctgaaaagcgtgtggctttctggacttgtttcaggccacccacgagccagcgggaaaggattgccagccagagaaagacgaactccgaagtcccaatgcacagatcagcccccagtcaaaccaccaagaggagccgatcgccattttccactactcgtcgtagttgggacgacagcgagagttcgggaaccaacctgaatattgataatgaggactattccaggtatccgccaagagagtacagagcttcgggtagcagaagaggaatggcctatggacatattgactcttatggggcagatgatagtgaggaggagggggctgggcctgttgagcgaccgccagtgagagggaaaactggcaagtttaaagatgataagctgtatgacccagagaaaggggcaaggtctttggctgggccacctccacatttctctagttttagccgtgatgtgagagaggagcgagacaagttagacccagtccctgcagcaagatgctcagctagcagagctgacttcctgccacaaagtagtgtggcctcacagtcgtcttctgaaggcaagctggctacaaaaggtgacagctcggagagggagagaagggagcaaaatttacctgcacgtcccagcagggctcctgtgagtatttgtggtggtggggaaaacacctcaaagagtgcagaggaacctgtggtcaggcccaaaatcagaaacctggcaagtccaaactgcgtgaaaccaaaaattttttttgatactgatgatgatgacgatatgccacacagtacttccaggtggagggataccgccaatgacaatgagggccactcggatggcctggcaagaagagggagaggcgagagttcaagtggctatcccgagccaaagtaccctgaagacaaacgggaagcgaggagtgaccaagtgaaaccagaaaaggtgccgagacgacgacgcaccatggccgaccctgacttctggacgcacagtgatgattactacaaatactgcgacgaagactctgacagtgacaaagagtggattgctgctctgcgtcggaaatatcgaagccgagagcaaaccctgtcctccagtggcgaaagctgggagactctgccggggaaagaagagcgggaacctccacaggctaaggtgagtgccagcactggcaccagccctggccccggtgctagtgccagtgccggggctggcgccggggccagtgctggcagcaatggcagcaattaccttgaagaagttcgagaaccatctcttcaggaagagcaggcatccctggaagaaggagaaattccttggctccagtaccatgagaatgacagtagcagtgagggggataatgattctggtcacgagttgatgcaacctggggtattcatgctggatggaaacaacaaccttgaagatgactccagtgtgagcgaagacctagaagtggattggagcctctttgatggatttgcagatgggttaggagtggctgaagccatttcctatgtggaccctcagttcctcacctacatggcacttgaagaacgcctggcccaggcaatggaaactgcccttgcgcacttggagtctctcgcagtggatgtagaggtggccaatccaccagcaagcaaggagagcattgacgctcttcccgagatcctggtcactgaagatcatggcgcagttggtcaggagatgtgctgccccatctgctgtagcgaatatgtgaagggggaggtggcaactgagctgccgtgccaccactatttccacaagccgtgtgtgtccatctggcttcagaagtcaggcacctgccccgtgtgccgctgcatgttccctcccccactctaaagaccaaggccgtttactcctggtctgattattttccccatctgaaatccacaatactgcaggagccctcttgaaattaacaatggaaataaaaccaatcagtcagttagcctaaacctattgattcctcgtgattatttccaatgtgaaaacagttgtgtatgattgcattaaaaatcatatcatcttttagaggttagaaaagggaaaactaaactttctaaatgctacttgagattgcagtaagaagatacgttttctaacctgaaagttaaatcgcatttgttttcttcagtagaatgggaatgtgttgctgttacttgtaatgtcaagtttatctgttaaatatgtccaaaaggcaaaatcatttttgttgcatgttatgggtcgatgttcctgtaattgcagtgccgtaaaagcttattaaagttgttcttttggttttacatggtataatggaattttttggttttgtctgaagcagtggtactgaatgactttataattgatcccttgcatttgcatcaaaagctttagtttcactggaaatgctgacttcaacaattgca

SEQ ID NO: 2067 - DNA, 1377 bp, Homo sapiens
gaggcgggaggatgaagttgattgactatggtctctccggctaccaggaagagtctgccgaaggtgaaggccatggacttcatcacctccacagccatcctgcccctgctgttcggctgcctgggcgtcttcggcctcttccggctgctgcagtgggtgcgcgggaaggcctacctgcggaatgctgtggtggtgatcacaggcgccacctcagggctgggcaaagaatgtgcaaaagtcttctatgctgcgggtgctaaactggtgctctgtggccggaatggtggggccctagaagagctcatcagagaactcaccgcttctcatgccaccaaggtgcagacacacaagccttacttggtgaccttcgacctcacagactctggggccatagttgcagcagcagctgagatcctgcagtgctttggctatgtcgacatacttgtcaacaatgctgggatcagctaccgtggtaccatcatggacaccacagtggatgtggacaagagggtcatggagacaaactactttggcccagttgctctaacgaaagcactcctgccctccatgatcaagaggaggcaaggccacattgtcgccatcagcagcatccagggcaagatgagcattccttttcgatcagcatatgcagcctccaagcacgcaacccaggctttctttgactgtctgcgtgccgagatggaacagtatgaaattgaggtgaccgtcatcagccccggctacatccacaccaacctctctgtaaatgccatcaccgcggatggatctaggtatggagttatggacaccaccacagcccagggccgaagccctgtggaggtggcccaggatgttcttgctgctgtggggaagaagaagaaagatgtgatcctggctgacttactgccttccttggctgtttatcttcgaactctggctcctgggctcttcttcagcctcatggcctccagggccagaaaagagcggaaatccaagaactcctagtactctgaccagccagggccagggcagagaagcagcactcttaggcttgcttactctacaagggacagttgcatttgttgagactttaatggagatttgtctcacaagtgggaaagactgaagaaacacatctcgtgcagatctgctggcagaggacaatcaaaaacgacaacaagcttcttcccagggtgaggggaaacacttaaggaataaatatggagctggggtttaacactaaaaactagaaataaacatctcaaacagtaagagttgtagtcttccaggactagaaccttgtgtcctttgaattctcgccctgccagctcctagaaatagtttcaatcttggaatcagatgttatgtcacctgaaa

SEQ ID NO: 2068 - DNA, 937 bp, Homo sapiens
ggggggtgggcgccagcgccccggcgaacggcaaagagggagccgctcccgctcggggggccgctggagtgcccagcgggaacccgaaagtttgtaagaggaagagagcgcgcggcgagcgagcgagcgggccgggggcagcggcagcggcgccggggaccatggtgctgccggcgcctcctccgcgggcgtgaaggcggcgctcctactccctccccggactccgcggtgtcccagaagcttttgttgacaattccagtttccgaacaaaacatttcggcaatggtgagggcttcgatcccttctctgatttgctgtcagccatgaacggatggatgtgatgcctgctagccaaaaggcttccctctgtgtgttgcagtcctgtggcattatgcatgccccctcccagtgaccccaggctttttatggctgtgagacacgttaaaatttcaggggtaagacgtgaccttttgaggtgactataactgaagattgctttacagaagccaaaaaaggtttttgagtcatgatgcaagaatctgggactgagacaaaaagtaacggttcagccatccagaatgggtcgggcggcagcaaccacttactagagtgcggcggtcttcgggaggggcggtccaacggagagacgccggccgtggacatcggggcagctgacctcgcccacgcccagcagcagcagcaacagtggcatctcataaaccatcagccctctaggagtcccagcagttggcttaagagactaatttcaagcccttgggagttggaagtcctgcaggtccccttgtggggagcagttgctgagacgaagatgagtggacctgtgtgtcagcctaacccttccccattttgaataaaattattctttggagaaaaaaaaaaaaaaaaaaaaaaaaaaaaaaaaaaaaaaaaaaaaaaa

SEQ ID NO: 2069 - DNA, 3946 bp, Homo sapiens
cccatgctgccctgcgccaacccctcccctcacctttcctcccccgccctctactcgccgcccggccggtccccccacccgtcccttcccttatcagcacccgcggccccggcagcgccgacgcaggcgcactgcaccgcgccgccgccattttgtgtctgagcctgtggagcgattaaaccgtgcgcggagctgcttctttggcggcagcggcggcggcggtggccggtgcggacgcgcggagctcgccggagacgccgggtggccggagccgtggagcggcggcggagcgggcgccgcggggggtgtggcgcggagaatgattacggacctgaagccaaagaacaagatgcgctagtggacagattgctgaccaggggcttgagagctgggttctattttccctcctcaaactgactttgcagccacggagaggcaggggaaatggaaggtgatgcagtcgaagccattgtggaggagtccgaaacttttattaaaggaaaggagagaaagacttaccagagacgccgggaagggggccaggaagaagatgcctgccacttaccccagaaccagacggatgggggtgaggtggtccaggatgtcaacagcagtgtacagatggtgatgatggaacagctggaccccacccttcttcagatgaagactgaagtaatggagggcacagtggctccagaagcagaggctgctgtggacgatacccagattataactttacaggttgtaaatatggaggaacagcccataaacataggagaacttcagcttgttcaagtacctgttcctgtgactgtacctgttgctaccacttcagtagaagaacttcagggggcttatgaaaatgaagtgtctaaagagggccttgcggaaagtgaacccatgatatgccacaccctacctttgcctgaagggtttcaggtggttaaagtgggggccaatggagaggtggagacactagaacaaggggaacttccaccccaggaagatcctagttggcaaaaagacccagactatcagccaccagccaaaaaaacaaagaaaaccaaaaagagcaaactgcgttatacagaggagggcaaagatgtagatgtgtctgtctacgattttgaggaagaacagcaggagggtctgctatcagaggttaatgcagagaaagtggttggtaatatgaagcctccaaagccaacaaaaattaaaaagaaaggtgtaaagaagacattccagtgtgagctttgcagttacacgtgtccacggcgttcaaatttggatcgtcacatgaaaagccacactgatgagagaccacacaagtgccatctctgtggcagggcattcagaacagtcaccctcctgaggaatcaccttaacacacacacaggtactcgtcctcacaagtgcccagactgcgacatggcctttgtgaccagtggagaattggttcggcatcgtcgttacaaacacacccacgagaagccattcaagtgttccatgtgcgattacgccagtgtagaagtcagcaaattaaaacgtcacattcgctctcatactggagagcgtccgtttcagtgcagtttgtgcagttatgccagcagggacacatacaagctgaaaaggcacatgagaacccattcaggggaaaagccttatgaatgttatatttgtcatgctcggtttacccaaagtggtaccatgaagatgcacattttacagaagcacacagaaaatgtggccaaatttcactgtccccactgtgacacagtcatagcccgaaaaagtgatttgggtgtccacttgcgaaagcagcattcctatattgagcaaggcaagaaatgccgttactgtgatgctgtgtttcatgagcgctatgccctcatccagcatcagaagtcacacaagaatgagaagcgctttaagtgtgaccagtgtgattacgcttgtagacaggagaggcacatgatcatgcacaagcgcacccacaccggggagaagccttacgcctgcagccactgcgataagaccttccgccagaagcagcttctcgacatgcacttcaagcgctatcacgaccccaacttcgtccctgcggcttttgtctgttctaagtgtgggaaaacatttacacgtcggaataccatggcaagacatgctgataattgtgctggcccagatggcgtagagggggaaaatggaggagaaacgaagaagagtaaacgtggaagaaaaagaaagatgcgctctaagaaagaagattcctctgacagtgaaaatgctgaaccagatctggacgacaatgaggatgaggaggagcctgccgtagaaattgaacctgagccagagcctcagcctgtgaccccagccccaccacccgccaagaagcggagaggacgaccccctggcagaaccaaccagcccaaacagaaccagccaacagctatcattcaggttgaagaccagaatacaggtgcaattgagaacattatagttgaagtaaaaaaagagccagatgctgagcccgcagagggagaggaagaggaggcccagccagctgccacagatgcccccaacggagacctcacgcccgagatgatcctcagcatgatggaccggtgatggcggagccttgtgcgtcgccaggacttctctgggctgtgtttaaacggcccgcatcttaatttttctcccttctttctttttttggctttgggaaaagcatcattttaccaaacataccgagaacgaaaacttcaaggatgatgttagaaaaaaatgtgatttaactagaacttgctgtctgatgttagcaaatcatggaatgttctgagtccctgagggtttactgtgaagtgctgaggacagtgttgacaactaactcgttttcctagatggaaacggagacattgacccctccctccatgtggtaaaccactccagaatggccaccaggcttcccagagttctatggtcttcttcccaagagagtttttaattgtaaatgcatacttgggaaggacttagagttttaaactgttttttgcttttgcttttccctgactccctttgcttggagtcagctgcacaccagtagtatggcatgctacgatcaggttctgtcctgaaagctttgcctctttcttggcaaagtttctggtatggtcaagcttgtaaataactttttttacattttaatcttttccattaattaagaggttgaaaagaagtgcagtgtaagaaaacccagcattttaattacttgcaaattaagttaccacagactctgtagtgtgtaaatgttgacaaggaattggatcacaatcatgtagcagaatggcacccagaccactgcccaccagtgacggacatgcacgtggcagatcatgatttccagcccacggagccagcatttgaaccttgtataattaactttcagttatgatttcccatcgacattttctttgccctgtttgtagctgattgttgtgttttataaatcttctgttaaggcagaagggtgattatgagtggttcacagcagcccttataagctgggccagaaaatttcactaggtcagtaatttaaaccttggatcttcaaaaaataaaataatgtgaagcaaaaccaactaaaaagtgattcttgcacatgaactgtcacatgtttaaaaatgtgttttttagagagcctcagtcttactgatttcaaacacttttttcttctgtgtattgcttttaagagagccatcagttagctatcagactctaggttgatgcattttgtacttagctgtactgtgtgatatttttcattattttaggacgccaacatgagacctgtaataaaatatgtaatggggttgaaagctggggaggaggatctactgctgtacagctaataaatcataacggattaacaagtgctccaaagaaaaaa

SEQ ID NO: 2070 - DNA, 1746 bp, Homo sapiens
tgttgctgtcgctttagtgactcttctctgccacacgcttcctgtgcctttgccttcctctggtgtgattcggcaggaagaccaaagaggggaaaaagaagtcacgggcacccctttgggacctacaatcagagaggaaggttactttccttcagagctttaatcacctgaaggccctggcggctgccactgtcactgtcactgcctctgtcaccaccactgctgccacaggattgcctgtgggctagaacatgaaagtacaaagaaaagaagaaagaaaaactggggattcccttaactatcgctgagggctcagaagtggaaaaatatgaagatccattgctgatgggaatcctgccctaagcaaacggtgtgtactaaagggagcacattgttgagaaggaccggttgcaaatttccaaaaaggagagtaaaataattaatgagtcaaggtctcaggagagacagaaggatgacttacaacttaagtgtctccctttgtgggaggaatcccagctatagcctagtggaccattcacccagggatcttcaatcattcgttcaaccctaacatttatatgcgcaccagctacatgctaggcagtgcgtcaggcattaaagatacaaggacgaatacagcagacacgacctcagtctttggacagagtttaccttctattgaggaagatagatgataaacaagtaataaatacataaacaaagtaatttcagctagctataaatgctatgaaaaaataatagtgttatataataaagagcgactgggaaatctatttcacatggagtgttaagtgaaggactttttgaagaagcgacatttgagctgttacctgtatgatacgagaccaacaatgtaacaagctgaggggagagcattccaggcaaagggaaaagcaaaaacacagccttggagtggaatggagttttattctgtttgccgaccagtaagaaggtcacgtggctggagctgagtaagcaaggggaataatggtgggagaaattacgtggaggaggtagtcaggggctagatcatgtatatattgccatgcaggccatggtaaggactttggattttattctgagtaccatgggaagccactgaaaaaccttgcctaagataatgggtttctgttttgcctaaggcaaattaactttttactgaagtatactatacattacggaaaaagtacacaaatcgtaagcttgatgaattttcatgatgtaatcgcatccatatcactagcacccaggtcaataaacagatcattaccagaaccccagaaccctcccttatgcccctttccagtaacgcccatcccccaacccacgggtaactaccatcctgacttctatcaccaaagattagttttgcctgtttatataaaactttatataattgcaatcacaatatgtattcattttgtgtctggcttctttcatttaatattatgtttaggagtttcatcattgcttagcaatagtttattggtgctatatggaagttgagtgcgtgatcacaccacagtttatccattctactgttgatggacatatgagtaatttccggtttggaactactacaaacagtgctgttatgaacattctattacatgtcttttggtgaacaaatatattcactcctgtttgaaataaacttaagaatggaacttatggatcataaaaaaaaaaaaaaaaaaaaaaaaaaaaaaaaaaaaaaaaaaaaaa

SEQ ID NO: 2071 - DNA, 2722 bp, Homo sapiens; identical to SEQ ID NO: 2002

SEQ ID NO: 2072 - DNA, 1171 bp, Homo sapiens
gcgtcacgcagcgcacgtcgccgcgcgcctgcgctcttttccacgtgcgaaagccccggactcgtggagttgtgaacgccgcggactccggagccgcacaaaccagggctcgccatgaagccaggattcagtccccgtgggggtggctttggcggccgagggggctttggtgaccgtggtggtcgtggaggccgagggggctttggcgggggccgaggtcgaggcggaggctttagaggtcgtggacgaggaggaggtggaggcggcggcggcggtggaggaggaggaagaggtggtggaggcttccattctggtggcaaccggggtcgtggtcggggaggaaaaagaggaaaccagtcggggaagaatgtgatggtggagccgcatcggcatgagggtgtcttcatttgtcgaggaaaggaagatgcactggtcaccaagaacctggtccctggggaatcagtttatggagagaagagagtctcgatttcggaaggagatgacaaaattgagtaccgagcctggaaccccttccgctccaagctagcagcagcaatcctgggtggtgtggaccagatccacatcaaaccgggggctaaggttctctacctcggggctgcctcgggcaccacggtctcccatgtctctgacatcgttggtccggatggtctagtctatgcagtcgagttctcccaccgctctggccgtgacctcattaacttggccaagaagaggaccaacatcattcctgtgatcgaggatgctcgacacccacacaaataccgcatgctcatcgcaatggtggatgtgatctttgctgatgtggcccagccagaccagacccggattgtggccctgaatgcccacaccttcctgcgtaatggaggacactttgtgatttccattaaggccaactgcattgactccacagcctcagccgaggccgtgtttgcctccgaagtgaaaaagatgcaacaggagaacatgaagccgcaggagcagttgacccttgagccatatgaaagagaccatgccgtggtcgtgggagtgtacaggccaccccccaaggtgaagaactgaagttcagcgctgtcaggattgcgagagatgtgtgttgatactgttgcacgtgtgtttttctattaaaagactcatccgtctcccaaaaaaa

SEQ ID NO: 2073 - DNA, 3993 bp, Homo sapiens; identical to SEQ ID NO: 1371

SEQ ID NO: 2074 - DNA, 6405 bp, Homo sapiens; identical to SEQ ID NO: 123

SEQ ID NO: 2075 - DNA, 3239 bp, Homo sapiens
gcgggagcgcagttagagccgatctcccgcgccccgaggttgctcctctccgaggtctcccgcggcccaagttctccgcgccccgaggtctccgcgccccgaggtctccgcggcccgaggtctccgcccgcaccatgcggctgggcagtcctggactgctcttcctgctcttcagcagccttcgagctgatactcaggagaaggaagtcagagcgatggtaggcagcgacgtggagctcagctgcgcttgccctgaaggaagccgttttgatttaaatgatgtttacgtatattggcaaaccagtgagtcgaaaaccgtggtgacctaccacatcccacagaacagctccttggaaaacgtggacagccgctaccggaaccgagccctgatgtcaccggccggcatgctgcggggcgacttctccctgcgcttgttcaacgtcaccccccaggacgagcagaagtttcactgcctggtgttgagccaatccctgggattccaggaggttttgagcgttgaggttacactgcatgtggcagcaaacttcagcgtgcccgtcgtcagcgccccccacagcccctcccaggatgagctcaccttcacgtgtacatccataaacggctaccccaggcccaacgtgtactggatcaataagacggacaacagcctgctggaccaggctctgcagaatgacaccgtcttcttgaacatgcggggcttgtatgacgtggtcagcgtgctgaggatcgcacggacccccagcgtgaacattggctgctgcatagagaacgtgcttctgcagcagaacctgactgtcggcagccagacaggaaatgacatcggagagagagacaagatcacagagaatccagtcagtaccggcgagaaaaacgcggccacgtggagcatcctggctgtcctgtgcctgcttgtggtcgtggcggtggccataggctgggtgtgcagggaccgatgcctccaacacagctatgcaggtgcctgggctgtgagtccggagacagagctcactggccacgtttgaccggagctcaccgcccagagcgtggacagggcttccgtgagacgccaccgtgagaggccaggtggcagcttgagcatggactcccagactgcaggggagcacttggggcagcccccagaaggaccactgctggatcccagggagaacctgctggcgttggctgtgatcctggaatgaggccctttcaaaagcgtcatccacaccaaaggcaaatgtccccaagtgagtgggctccccgctgtcactgccagtcacccacaggaagggactggtgatgggctgtctctacccggagcgtgcgggattcagcaccaggctcttcccagtaccccagacccactgtgggtcttcccgtgggatgcgggatcctgagaccgaagggtgtttggtttaaaaagaagactgggcgtccgctcttccaggacggcctctgtgctgctggggtcacgcgaggctgtttgcaggggacacggtcacaggagctcttctgccctgaacgctcccaacctgcctcccgcccggaagccacaggacccactcatgtgtgtgcccacaagtgtagttagccgtccacaccgaggagcccccggaagtccccactgggcttcagtgtcctctgccacattccctgggaggaacaatgtccctcggctgttccggtgaaaagttgagccacctttggaagacgcacgggtggagtttgccagaagaaaggctgtgccagggccgtgtttggctacaggggctgccggggctcttggctctgcagcgagaaagacacagcccagcagggctggagacgcccatgtccagcaggcgcaggcctggcaacacggtccccagagtcctgagcagcagttaggtgcatggagagggtatcacctggtggccacagtcccccttctcacctcagcaatgatccccaaagtgagaggtggctcccccggcccccaccaccctcagcagccccaccccactcaaccctgagggtccccagggtcctgatgaagacctccgaccccagcgccaggctcctcggagcccaacagtcccaagggggcaggagacggggtggtccagtgctgaggggtacagccctgggccctgaccagccccggcacctgccatgctggttcccggaatgaatcagctgctgactgtctccagaagggctggaaaggatgctgccaggtgacccgaggtgcactcgccccagggagatggagtagacagcctggcctggccctcgggacacattgtctgccccggggctatgggcaaatgcccctccttcttacttcccagaatcccctgacattcccagggtcagccaggacctgttacagccctggtcacttggaactgacagctgtgtgaggcctgcacttctcagacccagacttagaacaaaaggaggagtgaggactcaaggctacaatgaggttccagtacttgttacaagaaattggttttctgcaaaaaaagtccctacctgagcctttaggtgaatgtgggatccactcccgcttttaacatgaaagcattagaagatgtgtggtgtttataaaagaacagttgtcatcaccgggcattgattggcagggacaaggagctgcttgggtgtggaaagttggggcgttggaaagtgggctgtggtgcccatttgcagtgactgtgaagtgactccaggacggacctgcgggggcacccagaggtcctaagccccaggactgagggtcgtgcatcaccactcgggtgtcccgggaggtgccctgggcccggggacctcacaggcaggacggcgacactaatgcagggagagggagtctggccccagcttttcctatcagaggcgattttccttcaccaggggatgggcaggaaagaggcaggggccccagaagcttctgtccctcatgcctgagggcacgggggacacttggaggctgctgtcaccactgtgcgtccaaggccatgctctctgcgggtcagtgcctgagtctcgcctccctgctggtccctgaagccccctcagaagccctgcctgtcacgtcggcatttgtgagacctaccctgtaacgcctgcccctctcagcccaacatcagcttcctctttctcccttgctgtagacaggctggattccagtgttgggacagccatctccagaaacctgacttaagagagtaagatgcaaa

SEQ ID NO: 2076 - DNA, 3936 bp, Homo sapiens
gcggccggtgggctccgcccttaaccaagatggcgatacgcgtgggaccggaaagagtttatagatttcccgtctaccctacctctgaggtgaaggtgggactgccctgtggagcccaccctttccgttatgcgcccgcgcggcgcaatgacgtaacacaggcccgcccactgcccctgttgggttcctgagtcgtgctgcgtcgacaacggtagtgacgcgtattgcctggaggatggcggacgccggcattcgccgcgtggttcccagcgacctgtatcccctcgtgctcggcttcctgcgcgataaccaactctcagaggtggccaataagttcgccaaagcgacaggagctacacagcaggatgccaatgcctcttccctcttagacatctatagcttctggctcaagtctgccaaggtcccagagcgaaagttacaggcaaatggaccagtggctaagaaagctaagaagaaggcctcatccagtgacagtgaggacagcagcgaggaggaggaggaagttcaagggcctccagcaaagaaggctgctgtacctgccaagcgagtcggtctgcctcctgggaaggctgcagccaaagcatcagagagtagcagcagtgaagagtccagtgatgatgatgatgaggaggaccaaaagaaacagcctgtccagaagggagttaagccccaagccaaggcagccaaagctcctcctaagaaggccaagagctctgattctgattctgactcaagctccgaggatgagccaccaaagaaccagaagccaaagataacacctgtgacagttaaagctcagactaaagcccctcccaaaccagctcgagcagcacctaaaatagccaatggtaaagcagccagtagcagcagtagcagcagcagcagcagtagcagtgatgactcagaggaggagaaggcagcagccacccccaagaagactgtacctaaaaagcaagttgtggccaaggccccagtgaaagcagctaccacccctacccggaagagttctagcagtgaggattcctccagtgacgaggaagaggagcaaaaaaaacccatgaaaaataaaccaggtccctacagttcagtccccccgccttctgctcccccaccaaagaagtctctgggaacccagcctcccaagaaggctgtggagaagcagcagcctgtggaaagcagtgaagacagcagtgatgagtctgattcaagttctgaagaagagaagaaacccccaactaaggcagtagtctctaaagcaaccactaaaccacctccagcaaagaaagcagcagagagctcttcagacagctcagactctgacagctctgaggatgatgaagctccttctaagccagctggtaccaccaagaattcttcaaataagccagctgtcaccaccaagtcacctgcagtgaagccagctgcagcccccaagcaacctgtgggcggtggccagaagcttctgacgagaaaggctgacagcagctccagtgaggaagagagcagctccagtgaggaggagaagacaaagaagatggtggccaccactaagcccaaggcgactgccaaagcagctctatctctgcctgccaagcaggctcctcagggtagtagggacagcagctctgattcagacagctccagcagtgaggaggaggaagagaagacatctaagtctgcagttaagaagaagccacagaaggtagcaggaggtgcagccccttccaagccagcctctgcaaagaaaggaaaggctgagagcagcaacagttcttcttctgatgactccagtgaggaagaggaagagaagctcaagggcaagggctctccaagaccacaagcccccaaggccaatggcacctctgcactgactgcccagaatggaaaagcagctaagaacagtgaggaggaggaagaagaaaagaaaaaggcggcagtggtagtttccaaatcaggttcattaaagaagcggaagcagaatgaggctgccaaggaggcagagactcctcaggccaagaagataaagcttcagacccctaacacatttccaaaaaggaagaaaggagaaaaaagggcatcatccccattccgaagggtcagggaggaggaaattgaggtggattcacgagttgcggacaactcctttgatgccaagcgaggtgcagccggagactggggagagcgagccaatcaggttttgaagttcaccaaaggcaagtcctttcggcatgagaaaaccaagaagaagcggggcagctaccggggaggctcaatctctgtccaggtcaattctattaagtttgacagcgagtgacctgaggccatcttcggtgaagcaagggtgatgatcggagactacttactttctccagtggacctgggaaccctcaggtctctaggtgagggtcttgatgaggacagaagtttagagtaggtcctaagactttacagtgtaacatcctctctggtccttttctgtgttcctagttttgtacagacttgtttttgagtgttgagtagcagggacaaaataagggaatgttattttttaagaaaattcattttcattgttgtctccttccttttctgtgaaagtcctcatactgagaaatttgtatattttatattaaatcacttactattgatttttgttgtgattttcaaaggtggattcccacagataaaatcttggctattgcccaaaacatagtaaagggtcacgtgtgactttttataataggaagaaaattctgcctttgtgagtgcacatgtccacatttcatccctccttccctcaaaaccctagagaggggcattaaagaattgttgatgtatatgcaatgtctgttaagcatgcactatgtatttcatcctcatttattgggtctgggactgaagtttttagccagcatggacctaacctactttttgggataaaattctctgttttgttacaggcaaaattctggtatggcgtgaatgccatgggtcattctgaatatatttttttctgtaattttatcattacacgatgtttgcaatacgtgctttgttttttaatttgaaagcaaacttttctactgttgaaagacattttttgacaacttgacccttcctagtattgagttctaagttgaggactgcatcttctcgttttttacagtatagagaacaaaatgacatgagtttgaaaaatacatatcacttggtattgctgtcttggttgcagtggtgatacagaattggtttcattaattcctacatggttgagaatcactgatcaagaaagtggggggaaaaaaaacaaacgttaaaacctcaatcctcagtaggaaggtagattacattaggtgaaattataggtaatctatgtatgtgctaatggggttggaaagaaccttacagagcatattacctgataaactggagtgggtttgggagaacaaactaataggattattgtgtctcctagttggtacctgggagcaattgacatgcccccttcagaaccttaactgttagtagcagtggctgtaacaacacaaaccagtgaccagagataacagcttttaggccaagctggcctgacggtatggctgcaggaagtgactgagcagtagcggtactcagccagaccaagacggagagggaagagtccacagctttctggaagctaaggcattctggtggtagaaaagtgtgccccaagccttcatggacgagttataggtcttaagattagtctcctcttgtttggattccatacttgctaaataacctgataataacctggttttccatgtaactgcctctaggaagaaaatgtactgttcatgctgacacagatatttcagtctgcatggtaaaagttctaaatcttactacaaaataataaactggctggtttataatgtg

SEQ ID NO: 2077 - DNA, 1809 bp, Homo sapiens; identical to SEQ ID NO: 1713

SEQ ID NO: 2078 - DNA, 2368 bp, Homo sapiens
gcgccgccaggcgtaggcggggtggcccttgcgtctcccgcttccttgaaaaacccggcgggcgagcgaggctgcgggccggccgctgcccttccccacactccccgccgagaagcctcgctcggcgcccaacatggcgggtgggcgctgcggcccgcagctaacggcgctcctggccgcctggatcgcggctgtggcggcgacggcaggccccgaggaggccgcgctgccgccggagcagagccgggtccagcccatgaccgcctccaactggacgctggtgatggagggcgagtggatgctgaaattttacgccccatggtgtccatcctgccagcagactgattcagaatgggaggcttttgcaaagaatggtgaaatacttcagatcagtgtggggaaggtagatgtcattcaagaaccaggtttgagtggccgcttctttgtcaccactctcccagcattttttcatgcaaaggatgggatattccgccgttatcgtggcccaggaatcttcgaagacctgcagaattatatcttagagaagaaatggcaatcagtcgagcctctgactggctggaaatccccagcttctctaacgatgtctggaatggctggtctttttagcatctctggcaagatatggcatcttcacaactatttcacagtgactcttggaattcctgcttggtgttcttatgtgtttttcgtcatagccaccttggtttttggcctttttatgggtctggtcttggtggtaatatcagaatgtttctatgtgccacttccaaggcatttatctgagcgttctgagcagaatcggagatcagaggaggctcatagagctgaacagttgcaggatgcggaggaggaaaaagatgattcaaatgaagaagaaaacaaagacagccttgtagatgatgaagaagagaaagaagatcttggcgatgaggatgaagcagaggaagaagaggaggaggacaacttggctgctggtgtggatgaggagagaagtgaggccaatgatcaggggcccccaggagaggacggtgtgacccgggaggaagtagagcctgaggaggctgaagaaggcatctctgagcaaccctgcccagctgacacagaggtggtggaagactccttgaggcagcgtaaaagtcagcatgctgacaagggactgtagatttaatgatgcgttttcaagaatacacaccaaaacaatatgtcagcttccctttggcctgcagtttgtaccaaatccttaatttttcctgaatgagcaagcttctcttaaaagatgctctctagtcatttggtctcatggcagtaagcctcatgtatactaaggagagtcttccaggtgtgacaatcaggatatagaaaaacaaacgtagtgttgggatctgtttggagactgggatgggaacaagttcatttacttaggggtcagagagtctcgaccagaggaggccattcccagtcctaatcagcaccttccagagacaaggctgcaggccctgtgaaatgaaagccaagcaggagccttggctcctgagcatccccaaagtgtaacgtagaagccttgcatccttttcttgtgtaaagtatttatttttgtcaaattgcaggaaacatcaggcaccacagtgcatgaaaaatctttcacagctagaaattgaaagggccttgggtatagagagcagctcagaagtcatcccagccctctgaatctcctgtgctatgttttatttcttacctttaatttttccagcatttccaccatgggcattcaggctctccacactcttcactattatctcttggtcagaggactccaataacagccaggtttacatgaactgtgtttgttcattctgacctaaggggtttagataatcagtaaccataacccctgaagctgtgactgccaaacatctcaaatgaaatgttgtggccatcagagactcaaaaggaagtaaggattttacaagacagattaaaaaaaaattgttttgtccaaaatatagttgttgttgatttttttttaagttttctaagcaatatttttcaagccagaagtcctctaagtcttgccagtacaaggtagtcttgtgaagaaaagttgaatactgttttgttttcatctcaaggggttccctgggtcttgaactactttaataataactaaaaaaccacttctgattttccttcagtgatgtgcttttggtgaaagaattaatgaactccagtacctgaaagtgaaagatttgattttgtttccatcttctgtaatcttccaaagaattatatctttgtaaatctctcaatactcaatctactgtaagtacccagggaggctaatttcttt

SEQ ID NO: 2079 - DNA, 507 bp, Homo sapiens
  misc_feature (461)..(461): n is a, c, g, or t
tctggcaagtttgtgtaaccaaaaggccccagttcttagctcaacatgagagtgtaaaacccagcgttcaaggaatgtgaaccaatacctggtatgggcaaggacaaggaggagaataggaagcagaaggaatagaaggacccagactaactccagaggaaaatggtgagctaagacctttactgcatcacaaatcaataaatacttattgagaagctgctacatgcaagattctcctgcctgtaccactacgcccgaggtttttgtactgtgacactgagggacagtctgccaagctgctcacggcccttcagtgagtgggtgggggcggaggagagggtctgtgttctgaggggacattggccctggagacagggtgtgtaggagattcgtgaagggggaacgaggcactggtggctggctgaagagctccagagcccagatggtcctaggactcctgngctcctggctagaccctgagtgaggatccagatattggaatgcctg

SEQ ID NO: 2080 - DNA, 1229 bp, Homo sapiens
aagctttaaaccagcagagacctcagacaaatcatatccctcctggggtgaccaggtgcagatcttccagggagccgtctaatggaatttcctggttaatggacacagagaaccactgctaagaacgatttccttttctctttcaatctgcagtactttttatgaagactggtcttttgtgatggatgaagagaggtccagtatgcttcctaccatggcagcaggtccgaactccatactctttgcgattaacattgacaacaaggatttgaacgggcagagtaagtttgctcccaccgtttcagacctcttaaaggagtcaacgcagaatgtgaccttgctgaaggagtccacgcaaggagtgagcagcgtgttcagggagatcacagcctcctctgccatctccatcctcatcaaacctgaacaggagaccgaccccttgcccgtcgtgtccaggaatgtcagtgctgatgccaaatgcaaaaaggagcggaagaagaaaaagcaagtgaccaacattatctcatttgatgatgaggaagatgagcagaactctggggacatgtttaaaaagacacctggggcaggggagagctcagaggacaactccgaccactcctctgtcaatatcatgtccgcctttgaaagccccttcgggccaaactccaatggaagtcagagcagcaactcgtggaaaattgattccctgtctttgaacagggagtttgggtaccagaagcttgatgtgaaaagcatcgatgatgaagatgtggatgaaaacgaagatgacgtgtatggaaactcatcaggacggaagcacaggggccactcagagtcgcccgagaaaaacggagcacactctgtcacccaggctggagtgcaatggcacgatctcggctcactgcaacctctgcctcccgggttcaggtgattctactgcctcagcctcctaagtagctgggattacaggcgcctgccaccacacccagctaatttttgcatttttagtagagaaagggtttcgccatgttggccaggctggtcttgaactcctgacttcaggtgatcctcctcgcctgccttgcctcccaaagtgctgggattacaggcataagccaccacgcccggccctgcctcttgagctggggagttcaagaccagcctgggcaacataatgagatttcagctctattaaaaataataataattaaaaaaaaaaaaaaaaaaaa

SEQ ID NO: 2081 - DNA, 5738 bp, Homo sapiens; identical to SEQ ID NO: 2049

SEQ ID NO: 2082 - DNA, 3586 bp, Homo sapiens
gagctcgccgtcgctccgtcatagagttcgccccaccccatcccctcctttctggactcggagctcagttcacgcagtaacaaatgaagtgcgcgctgcgacacctcccagcccaccgaactccgccgccatttcctcgcttggcctaacggttcggccaatcccagcgcgcatcaagaaggactgaggctccgccaatcggaggccgccgatttcgacccttcgcctcggcccggcccaatccaggccccggccccgccgcccccggcccgcccccgcggtgccctctctcctccctctttgtgcgtctcgcgccgccgccgcccgccgcgtgagaggacgggctccgcgcgctccggcagcgcattcgggtcccctccccccgggaggcttgcgaaggagaagccgccgcagaggaaaagcaggtgccggtgcctgtccccgggggcgccatggcgaccggagcgaacgccacgccgttggacttcccaagtaagaagcggaagaggagccgctggaaccaagacacaatggaacagaagacagtgattccaggaatgcctacagttattccccctggacttactcgagaacaagaaagagcttatatagtgcaactgcagatagaagacctgactcgtaaactgcgcacaggagacctgggcatcccccctaaccctgaggacaggtccccttcccctgagcccatctacaatagcgaggggaagcggcttaacacccgagagttccgcacccgcaaaaagctggaagaggagcggcacaacctcatcacagagatggttgcactcaatccggatttcaagccacctgcagattacaaacctccagcaacacgtgtgagtgataaagtcatgattccacaagatgagtacccagaaatcaactttgtggggctgctcatcgggcccagagggaacaccctgaagaacatagagaaggagtgcaatgccaagattatgatccgggggaaagggtctgtgaaagaagggaaggttgggcgcaaagatggccagatgttgccaggagaagatgagccacttcatgccctggttactgccaatacaatggagaacgtcaaaaaggcagtggaacagataagaaacatcctgaagcagggtatcgagactccagaggaccagaatgatctacggaagatgcagcttcgggagttggctcgcttaaatgggacccttcgggaagacgataacaggatcttaagaccctggcagagctcagagacccgcagcattaccaacaccacagtgtgtaccaagtgtggaggggctggccacattgcttcagactgtaaattccaaaggcctggtgatcctcagtcagctcaggataaagcacggatggataaagaatatttgtccctcatggctgaactgggtgaagcacctgtcccagcatctgtgggctccacctctgggcctgccaccacacccctggccagcgcacctcgtcctgctgctcccgccaacaacccacctccaccgtctctcatgtctaccacccagagccgcccaccctggatgaattctggcccttcagagagtcggccctaccacggcatgcatggaggtggtcctggtgggcccggaggtggcccccacagcttcccacacccattacccagcctgacaggtgggcatggtggacatcccatgcagcacaaccccaatggacccccacccccttggatgcagccaccaccaccaccgatgaaccagggcccccaccctcctgggcaccatggccctcctccaatggatcagtacctgggaagtacgcctgtgggctctggggtctatcgcctgcatcaaggaaaaggtatgatgccgccaccacctatgggcatgatgccgccgccgccgccgcctcccagtgggcagcccccaccccctccctctggtcctcttcccccatggcaacaacagcagcagcagcctccgccaccccctccgcccagcagcagtatggcttccagtacccccttgccatggcagcaaaatacgacgactaccaccacgagcgctggcacagggtccatcccgccatggcaacagcagcaggcggctgccgcagcttctccaggagcccctcagatgcaaggcaaccccactatggtgcccctgccccccggggtccagccgcctctgccgcctggggcccctccccctccgccgcctccaccgcctggttccgccggcatgatgtatgccccgccccctcctcctccgcctcccatggacccttctaactttgtcaccatgatgggcatgggggtggcgggcatgccgcccttcgggatgcctccagctcccccaccgcctccaccacagaactagacttgttttttaagaaaatatatattatatatagagagaattggtctcgtttaaacacgccgaacctcaccatatggagccagacattgggacgcacgcatgtgattgtgtgtgcacgcatgtgtgtgtgtgcacgcactgggctgggccaagcgactgaggattcgcttgggaacgggcaggtggtagtaggggcgccagcttgggctctcctggcgccccgtagcatcgagtgtcttctttgtcttctttctctcctcacccaactccctttgcctctccccaaaccgggccgccaggatccctccccgcggcggcgatggcccgagccatgagagtgaggactttccgcgcccattggtgacccttccaggcagacagcctcagcaacgcccctggtggacaggatggttcggcaaagcagcctgagttatttttgtggacggaatcggaacacgctggctccatatcgtgaaatttttattaatttttttctttttcctttgttacttctttatcttttcctttcttcagactccgtccaaggagatgctctccccggtcttctgctgcaatttagattcctttcccttctctccagttctccttcccttaccaaggagaggggagcaaatggttttgggcaagggctttggccattcatgtcaagctggttgtgggtttttcaaggtgccatagccacccccaaagatgtttgtttaaagcgtggggttttttaatctctgccacccttgtcaagggagtcttgtaaagttgccgagggtaggttcatctccaggtttcgggattcccatccgtcctggcgatcctgccagcagtgggtgggcagcctgagctccctcgggctcgcctgccagcctggagttcttcctgtgctccttgatcacctgagctgcctcagattccatttggtcctctccttcctggaaggcttccttttatgttttgttttaatcccaaatgtctgaatgttttgcagtgtgtaggggtttgagccccttgttcattctccttcctttttcctcccgcttccctctccatgaagtgattctgttgacaataatgtatactgcgcgttctcttcactggtttatctgcagaaatttctctgggcttttttcggtgttagattcaacactgcgctaaagcggggatgttccattgaataaaagagcagtgtggttttctgggtc

SEQ ID NO: 2083 - DNA, 6132 bp, Homo sapiens
agttcagagagaggagagggagaaggagagaggggcagaggggaagggagagagggagagcacgcgagacggaaaggagcgcctcagagtctctgaagcacgcaagagataaccgattaggaatttttcgggcaactgtcacccggatagctgtcagagaatcatcatcaccgcaactctgacgtttcctacaagaagttagagacttaagcagtattggcatcggatggaaatggtatgcatgctgctgtggaaaatatccctgagctgaagaagtgcaactatgtgttgtgtgtgctaaatgcccagaagaacccagacccagtgggtaagagagacgaaatgtggagagaatgactaacgacaaatccgtgaatttgttctctggagttgctaatttgccagcccgaagcaacacattttacaaggaggaaacattttgctgcttctgatttctccccaaactggtgctaccagatgcatggctttctatgtgttggaacaaatcattcctaactgcagcatactgggaaaggggaaaggttgaggcaactaaccggctgtctccaaataagtgatgagatataatgcatcctccagtccatgcacgcttcctcttgcaatttgtgcatcattcctcagtggaaacctttaaaccctaaaatccaggaaaagaaaataaatacattatcatggacctgagggatttttacctgttggctgctctgattgcctgtttaaggctggattccgcaatagctcaagaacttatttacactattagagaggaattgcctgaaaatgtgcccataggaaacataccaaaggatctgaacatttctcacatcaatgctgccacagggaccagcgccagccttgtctacagactggtttctaaagctggggatgcccctttggtgaaagtttccagcagcactggggaaattttcacaacctccaacagaatagacagagaaaaactctgtgctggcgcctcatatgctgaggagaatgagtgtttctttgaacttgaggtggtgatcctccccaatgatttcttcaggctgatcaaaataaaaataattgtcaaggataccaatgataatgcccccatgtttccatctcctgtcatcaatatttccattccagaaaacactttgatcaacagccgctttccaattccatcagcaacagatcctgacacaggcttcaatggtgtacagcattatgaattgttaaatgggcagagtgtttttggactggatatcgtggaaactccagagggagagaagtggccacaactgattgttcagcaaaacttggatagagaacagaaagatacctatgtgatgaaaatcaaagtagaggatggaggcactccacagaaatccagtacggccatactgcaggtcacagtaagtgatgtaaatgacaacaggccagtgtttaaagagggtcaagtggaggtgcatattccagagaatgctcccgtaggtacctctgtaattcagctccatgccactgatgcagatataggcagtaatgctgaaatccggtacatttttggtgcccaggtcgcccctgcaaccaaaagactctttgctttaaataatactactgggctgattacagttcagaggtccttagatagagaggagacagccattcacaaagtgacagtgctggctagtgacggcagctccactcctgctcgagcaacggttaccatcaatgtcaccgatgtaaatgataaccctcctaatatagacctcaggtacattataagtcccatcaatggcaccgtgtatttatctgagaaagatcctgtcaatacaaagattgccctaattacagtttcagataaggacacagatgtgaatggcaaagtgatctgttttattgaaagagaggtcccatttcatttgaaggcggtatatgacaaccaatatttgttagagacctcttctttgttggactatgagggcaccaaagaattcagctttaaaattgttgcctctgattctgggaagcccagtttaaatcagactgccctggtaagggttaagcttgaggatgaaaatgacaacccaccaattttcaaccagcctgtaattgagctgtcagtttctgaaaacaaccgacgtgggttatacttaacaactattagtgccacagatgaagacagtgggaaaaatgcagacattgtttatcagcttggaccgaatgcctccttctttgatctggaccgaaaaacaggagttttgacagcctccagagtatttgacagagaagaacaagaacgattcatttttacagtaactgccagggacaatgggacccctcccctccaaagccaagcggctgtgattgttactgttctggatgagaatgacaatagccccaagtttactcataatcattttcaattttttgtgtctgagaatctgccaaagtatagtactgtgggggtaatcacagtgacagatgcagatgctggagagaataaagctgtgactctttccattctaaatgacaatgataattttgtgttggatccctattctggagtcataaagtcaaatgtctcatttgatagagagcagcagagttcctacacttttgatgtcaaagccactgatggaggacaaccacctcgttcctctactgcaaaagtaactatcaacgtcatggatgtcaatgacaacagcccagttgtcatttctccaccgtctaatacttcctttaagttggtgcccctctcagccattcctggctccgtggtagcagaagtttttgcagtggatgttgacactggaatgaacgctgaactaaagtatactatagtgagtggaaacaataaaggcttattccggattgatccagtaacaggtaacattactctggaagaaaaaccagcacctactgatgtgggattgcatcgtttggtggtcaacataagtgacctggggtaccctaagtctttgcacacgcttgtgcttgtattcctttatgttaacgacactgctggaaatgcctcctatatctatgacttgatccgcaggactatggagaccccgttggacaggaacataggggatagtagccaaccctatcaaaatgaggactatctaaccatcatgattgccatcatcgccggtgccatggtggtcattgttgtgatcttcgtcaccgttctggtgcgctgtcgccatgcatcaaggttcaaagcagctcagaggagcaagcaaggtgccgaatggatgtccccaaaccaggagaacaagcaaaacaagaaaaagaaaagaaagaaaaggaagtctcccaaaagctctcttttgaactttgttactatcgaagagtccaaacccgatgatgcagttcatgaacctatcaatgggacaataagcctgccggctgaactggaggagcaaagtataggaagatttgactggggcccggcacctccaacaacattcaagcctaacagtcctgacctggccaagcactacaaatctgcttctccacagcctgcttttcatctcaaaccagacactccagtttccgtgaaaaagcaccacgtgattcaggaactccctttggacaacacctttgttgggggttgtgacaccctttctaaacgctcttccactagttcagatcacttcagtgcctcagagtgcagttcccaaggaggcttcaagacaaagggccccttacacaccagacagtcgcagcgccgtgttacgtttcatctccctgatggctcccaggaaagctgcagtgacagtggtctaggagaccatgagccggtgggtagtggaaccctgatctcacaccctcttcctctggttcagccacaggacgaattctatgaccaggcctctccggacaagaggactgaagcagatggcaactctgatcccaactctgatgggcctttgggtccccgaggattagctgaagctacagagatgtgcactcaagagtgcttggttttgggtcactctgataattgctggatgcctcctggcttgggtccatatcaacaccccaaatctcctctctcaacctttgcaccccagaaagaatgggtgaagaaggacaagcttgtgaatgggcacaccctgaccagagcctggaaagaagacagcaacaggaaccagttcaatgaccgtaagcagtatggctccaatgaaggccatttcaacaatggcagccacatgacagacattcctctggcaaatctgaagtcttataagcaagcaggaggtgctactgagagtcctaaggagcaccaactctaagaaaaggctatatgggacctaataactttaaatagacatgctaataccgtgtgcgtcagagctttatgtattcaatagatctctacaactatgccccttctagcagggatacctataactttgtgttagcaccatggagaatacaatgtttttgcaacatatgagagaagatagttctagccatgcaattttgtttactagaattgattacactctccagagatctctccattgtgcaaattttttttattattgcattttattttgaccctggactgctgctatgaacaatagaatatgcatttggaaagtaagaaagtttcatggattagagtgactgaaaaacatatccagttagaaaattgtgcttttttttttttttttttttttttttgtcattgatttgtgctgggactgctatacttgacattatactgcaaacaaaacttaaagagataagcattaaacctattgtgctgttaacaacgttagtggacacttgtaagtcaatcagtgttaaagtatttgtaaatagaagcaagctattattaacaacttttgtgtacttataatgttcacctaaaaatgttgtagcataattctgtgttttatggttgcttctgtccttctttttatttacctctttgttgttatttttgttgtttctttcagtgaggtgtttctgtgttagtagtctgtcttgacacacattgttcaaacaatctcaagcacttgtgtttaaaaaaggttctgaaatcttgcttctcatatgatagcttatgatgccggaattctgtaaacaataaagatgaaagaaaaaatgaaaactttatacaaaaaaggacttctgcaaaagcttggaaattcagaacctattttttatcatcttattttcaaagtaggcaaaagcaaaatcacttaattagtaccattaagtgagagagtaatggaaaactgttatccatcaaaagtgatataatatcctgtacttgtcactcatgtaaaactaatgtatcaaaattagcatatatggaagaaaaatcactattcaaaaatagtttcaattgggcaaatgtgtgtctacaactttgttgaaatggcagagtctgtgttgatcctcatatacaataatgttgttgtaacacaagtgttattagaccatagccacaaaatatttaatgtgttgtgccttcatgatgtaacagaacattctccaggtagggtagttgggggaaataaagggataaatctctaattattgctgtttaactgtttgttatcatagttggtcaatgcctggcaggtaccagcatattgtcacttaggtcaaaccaataaagtgacaactaatgttaataagatctcagttgcacgtgcaaacaaatccaaattcgaacattcttaggaggtttttgttaaggcatgacagatgatttaaacaaataaatagcatgcaacaaaatgtctttattgaaagaagtggaagttatcttaatgccacggttcaccatcaatttaaaagtaaaaaaaacaaaaaaaaaacaaaaaatttaaaaaaaaggtttgctaatctgatagttaatttgttcttaccaaaaaataaaattactttgtaaatagcagttcacatttttccacagtataatggaaaataatgggtaggggtgcattgcttattgaagtacatttttgtcggtttgtgaggggtgtttgatgactttgacagaataaatatctaaacaattatccttgttactgctttgccagttctacgttatttacaattattcagctcttgcaataaatgttctgaattcctgaaaaaaaa

SEQ ID NO: 2084 - DNA, 1825 bp, Homo sapiens
ttttttttttttttttttttttttttaatcttgcactttgaaaccgcgggaccgaggcagggtgcgcgcgtgtggttggtgcctttttttttttttcttcccctccctaaactcctctgtcagtctgtaaacattacctgagaattccccagccgaaacggctgctggggcaagaaacttcttgttagaactttccacctccggcttccccctccacctcttttaccgtcccaaccttaggagacgctttttctcccccagaggagaatttatctttttttttttttttttttttctttttctcacccggtgctttgcatttgggaagaggtgatttcaagagtggccaggtgggacgcctctctcctccttattcggtttactatttattgttcggggtgttttttaattcctgtattgctcggcccggggagtttcgccccctgcccggctccgcggcgcggaggatggtgtggaaacggctgggcgcgctggtgatgttccctctacagatgatctatctggtggtgaaagcagccgtcggactggtgctgcccgccaagctgcgggacctgtcgcgggagaacgtcctcatcaccggcggcgggagaggcatcgggcgtcagctcgcccgcgagttcgcggagcgcggcgccagaaagattgttctctggggccggactgagaaatgcctgaaggagacgacggaggagatccggcagatgggcactgagtgccattacttcatctgtgatgtgggcaaccgggaggaggtgtaccagacggccaaggccgtccgggagaaggtgggtgacatcaccatcctggtgaacaatgccgccgtggtccatgggaagagcctaatggacagtgatgatgatgccctcctcaagtcccaacacatcaacaccctgggccagttctggaccaccaaggccttcctgccacgtatgctggagctgcagaatggccacatcgtgtgcctcaactccgtgctggcactgtctgccatccccggtgccatcgactactgcacatccaaagcgtcagccttcgccttcatggagagcctgaccctggggctgctggactgtccgggagtcagcgccaccacagtgctgcccttccacaccagcaccgagatgttccagggcatgagagtcaggtttcccaacctctttcccccactgaagccggagacggtggcccggaggacagtggaagctgtgcagctcaaccaggccctcctcctcctcccatggacaatgcatgccctcgttatcttgaaaagcatacttccacaggctgcactcgaggagatccacaaattctcaggaacctacacctgcatgaacactttcaaagggcggacatagagacaggatgaagacatgcttgaggagccacggagtttgggggccacagcacctgggcacacacccgagcacctgtccattggcatgcttctgctgggtgagcaggacagctcctgtccccagcgaagaatccggctgcccctgggccagtcccaggacctttgcacaggactgatgggtataactgacccccacagggaggcaggaaaacagccagaagccaccttgacacttttgaacatttccagttctgtagagtttattgtcaattgcttctcaagtctaaccagcctcagcagtgtgcatagaccatttccaggagggtctgtccccagatgctctgcctcccgttccaaaacccactcatcctcagcttgcacaaactggttgaacggcaggaatgaaaaataaagagagatggcttttgtgaaaaaaaaaaaaaaaaaaaa

SEQ ID NO: 2085 - DNA, 7121 bp, Homo sapiens
ggcccggcccgcggcggcggcaaaggggcggaggggttcgctgccagcaattgccaagctgctgcggtcgtggcgggatggtatagccgggcctgagggcgggcggcggggcgcgggcgggggcgaggcggccgggaagggccgacgccgcctgactggcttgggagcagcggcagcaagctgagggggcgtcgccgccgccggcccccggcgccgccgcgggaggccgcgcccgccatggcggcccgggcggtgctggacgagttcactgcgccagctgagaaggcggagctgctggagcagagccgcggccgtatcgagggcctgtttggcgtgagcctagccgtgctcggcgcgctaggggctgaggagccgctgcccgcgcgcatctggctgcagctctgcggggcgcaggaggcggtgcacagcgccaaggaatatattaaaggaatctgtgaacctgaactagaagaaagagaatgttaccccaaggacatgcactgcatttttgttggggcagagagcctgtttctgaaaagcttgattcaggatacttgtgctgacctctgcattctggacattggccttcttggcatcagaggaagtgctgaggctgtggtcatggctaggagtcacattcaacaatttgtaaagctctttgaaaataaagagaacctacccagtagtcagaaagaatcagaggtgaaaagggaattcaaacaatttgttgaagcccatgcagacaattacacaatggatttgttgattttgcccacttccttgaaaaaagaacttttgacactcacacaaggtgaggagaatctctttgaaacaggagatgatgaggttattgaaatgagagattctcaacaaacagagtttacacagaatgctgccacagggctgaatatttctagagatgaaactgttttgcaggaagaggcaagaaataaagctgggactcctgtttctgagcttacaaaacaaatggacacagtcctttctagctcaccagatgtgctttttgatccaataaatggtctaaccccagatgaagaggcactttccaatgagagaatttgtcagaaaaggagattttctgattctgaagaaaggcatacgaagaagcagttttctttggaaaatgttcaggagggggagattttacacgatgctaagacattggctggaaatgtaatagctgacctatctgattcttctgctgattctgaaaatttaagtccagatataaaagaaactactgaggaaatggaatacaacatcctcgtaaacttttttaaaaccatgggctactcccaagaaattgttgaaaaggtcattaaggtgtatggaccatctactgaaccattattgctcttagaggaaattgaaaaagaaaataaaagattccaagaagacagagaattttcagctggtacagtgtatccagagaccaacaaaaccaaaaataaaggtgtttatagcagcacaaatgagcttacaactgattccactccaaagaaaacacaggctcacacacagcaaaatatggtagaaaaattttctcagttaccattcaaagtggaagctaaaccatgtacctcaaattgtagaattaatactttcagaacagtgccaatagaacagaaacatgaagtctggggttcaaaccagaactacatttgtaacacagaccctgaaactgatggcctttcaccttctgttgcctctccaagtcccaaagaagtcaattttgtttcaaggggagcttcaagtcaccagcccagagttccactttttcctgaaaatggtttacaccagcagccagaacccttgcttccaaataatatgaaatctgcctgtgaaaaacgtttaggatgttgtagttctcctcattctaagccaaattgctcaaccctttctccaccaatgccactgccccagctgttaccttcggttactgatgcaaggtcggcaggaccttctgatcatattgattcctcagttactggggttcaaaggtttcgagatactctaaaaataccctacaagctggaattaaaaaatgaaccagggagaacggatttgaaacacattgttatagatgggagcaatgttgcaattacccatggtctgaaaaagttcttttcttgtcgtggaattgcaattgcagttgaatatttttggaagcttggcaacagaaacatcactgtatttgtccctcagtggagaacaaggcgtgatcctaatgtcacagaacagcacttcttaacccagctccaggagctcggaatattatctttaactcctgcccggatggtctttggagaaagaattgcttctcatgatgacaggtttctactacacttagcggacaaaactggtggcataattgtgacaaatgataatttcagagaatttgtgaatgagtcagtctcttggagagaaattattacaaaaaggctgctgcagtacacgttcgtgggggacatatttatggttcccgatgatcctctgggaagaagtggacctcgattagaggagtttcttcagaaggaagtctgtcttagagatatgcagcccctactcagtgccctgccaaatgtgggcatgtttgaccccagcttcagagtccctggcacccaggcagccagcaccagccaccagcctccgacccggattcagggagccccttcaagccactggctccctcagcagccccacttcccactgctgccagccctccccagtctccagcagaacctgcccatgccagctcagagatcttctgcagaaaccaacgagctgagggaagcccttctgaagatcttccctgactcagagcaaagactgaaaatagaccagatcttggtggcccacccatacatgaaagatctaaatgcgctttctgccatggtgttggattgaagattgtgctgagcgctgagcttgcgctcagggctggctgatcaaactcaagctcacacctgtacctgatgggaatgaacataatgtgaagaaacttatttcccagtgtaaacgcagttgtacagaaaaaaaatgttttgggtataaatctgggttttcaaaaccagcttttttctatatataaattatgctgctattacagatttaacattttctgttaaaggaaagtctacattttctgcctgttcagaactgtttaatagcagttactcttgagtgtatttacctttttatgttttttaaactattttccttaaagccgaaaatattgacaaatggatatggttagcctttataaataaataaaaaaaaaagtgttgctttcttaaggaaagcaagacgtcttaaagtatattttcttgagatgagtatgtcccatcactaccatgaagtgtgctcacccttccagcctcctctgccctcacccccggagttaaagtgggtaagagttggtttgttctgcagtctttggttggagtgttgtgaaagtggacccgcggtgccactagatggcacttggtgcctagccatggtgaatgaccagggcgaagttagtctcacagaataccagggctagaagacatcgtggagcccatggagtcccaccctccttcccccttccaccctgcgcaaaaggggacggcccagtgtgcacgccgtccggccatgcccacagccacagccacagctgaggagtggccgggcaggcagcaggctccccagccagggcttgacacgcccacagtcaggggcctccacatgcctggcctggctctggaagtcacgtcttagcttctgaacaccgtagcgggttatgaggaagtttaatgaagagcccggtcactgtggccatcttgtgtccccaactgcaggagacgccctgatgtggagtttgtacagctttgccaaaaaatggttttctattctcaaaagtgacccaagccaataaatagcattagtagcttctgtggggggatcccagagcccctgtatttattttccctgtgtttgtctctagtgtcctcctaaacagcctttcctgtgagtctttctcagaattgatatcttaatattgtctgttctaggtgttgcccaaattcagtgtcagtgaagttcttttcctgggcaatcttaacatctttactcttattgtctggaccttcaaagggctttgtattttacacctgcgcccccaggctgctcacagtcggcttgctgcctgtcctgcctgtccggatcttgtctcctagtcctgaggagcggaggctgagaactcagtgctggtttgtaaatggtgaggggacttgggggcatcccagagtgctccctccaggcctgcttcttggttttgtttgatcactgcgttcttcaagggatgaatccagagccctccatgaggccaagcttgtccttcaatcatgtttcctctcagatgcgtccgtgatgcctcctaatgtggaactggttgtccattgtttgggcctatggccaagtcacccagctgtggaagcagaggtagaagacgaggccagccaggagggcgacttcagtcacagctcccatgcctcagctttgtacctgttttcaaaagcacaactgaggtgtgcgggctggagctgtcttgcagtgattctggccttctggctcatggttcagtccagcagcctggctgacccactatttctcctctgcttcagaggaaacccaggaaatgcccttactgccaggctgagtctccacccatgctggttggtgctggctaggctgagggggccaccacttttcctggctagaagctacttgacctttgatgtttgagttctgtaagtcttcgtgttctgacttactgcttcagagggattggcctgtcccctttccctttctcggctatgggaaggaaggattgctcattggttgccttcatcagttacagcatgagacggaattcatcattccttccgaaacccctgatatttaatatttaatatttaaaaacccaaattatcaaaccattaagaactcattactggttctcagcctcctccagtactagcctcagtgtggctgctgcataagtatctgtagcctgtctacctcctgcagtggggccgctcgcctcttccctgtctactgctcaggctctcccacttcgtggcatccatgtaaagtaggtggcagggcagagatgtcactctcattcaacagggaggatgtctgttgctcagagaggttgtcctgaggggctgggtgattcctgggcctacattcttcccgaggctccaggccgctgtctctggaagtaaaagagccttgtctgaccttaatgcaagcagtctgtttgaacccctgtaggctgcattcaggagacagaaggtgtctgggccatcctgggcggccggtcagcgttgctaggcaggctcggctgtctggccgggacttgggcctgggtggcttttgagaccagtgaagaagggagagccggcctcatgccgatgcggcttgtggcacggctgggatgtgagggaggactcagatctacacacagaaacccctcttctccccgccctcccccagctcctacctgcctcccacgcctcaggtgtggctgcctgtgggaccatcccccaacccctttcctcgcacctccttgtcctcacccagttcctgcagtgtctctgacccacgcctcccgcctcctggccgacttgcccaggaggtgtctctggctcacctccgtctgttcatcaccttcctccccagtgtttccacttatcttggatgttttagattgaaacagcctgattcccggaagaatcctcttcattcattgctagtgcttcccctcacctcccactctccacttcccagtttgcaaatgtggctttcgcccaccaagtgaaagcggactgagagcagcccttggggacggcccggtgcctggctgcaaggccgcgctggggctctgtcttggtgcacatggcttgaccggactttccctgcttcccaccacttccctcactcccagacctccctcattctttttgtctcttctttttgcctaaagccagtccttaacaccctattcttcctctgcaggtggcttgcagacttttccccacctttggggctcgtggtggtggagagggcagctggtgttaagaatgtaggttaccgggcatgacccggcagatgcttgcccagtagttctggaggaaggcccgggaatctgcaaatgagcgcattccccaggcagttcccatgcaggtgatccacggaccacatgttgagaaactgcagtcacccttagggccacaccgtccctctcctcgctgtcccctctctgtagtgactggccctgaccttcaggagtgcactttccactctaccaggaagccctatgacatcctcaggctccccagacctgcagcttgcatggggcccctcccttcttccacacccaccctccgtatggtcccctgctctgccctcgtgctttgctggcccctgcccgctactcccactctcagacacccaggggtggtgggccctaactggctggcccctcccagcgctgccctctgccgtccagatgctgcagtgtggccagatttaccttccagtaacatacttctagtcacccctcctcctgcgaagtgatctgcagtggctgtttgaccagaccacaaagttcacatctcctgagcttagtgtccgtggctgtccacctcccagccatacttgactgtccccaaactctccctgcagccacatgtttcccatgacctgtgggctctgcagatggacctctctccgctagagatgcccttctcccaaatggcttccctcctggaaggcccagcctgagtcctcgtctcctttccagtgcttctgccagaagcatccccatgatgttgtgaccgcacagcactttgtgtctcgctttgagcacttgccactctggctggtgctgctgccactgattgtgtactgtcttgctgccctttctagactgtgagctcctcgtgggcagggaccgcctgtgttctctgtatttcccacggcgcctagcacagtgccttgcacttgataggtgcttaataaatgtctgctcaactgaaaaaaaaaaaaaaaaa

SEQ ID NO: 2086 - DNA, 2825 bp, Homo sapiens
gtacggcttccggtggcgggacgcggggccgcgcacgcgggaaaagcttccccggtgtccccccatccccctccccgcgccccccccgcgtccccccagcgcgcccacctctcgcgccggggccctcgcgaggccgcagcctgaggagattcccaacctgctgagcatccgcacacccactcaggagttggggcccagctcccagtttacttggtttcccttgtgcagcctggggctctgcccaggccaccacaggcaggggtcgacatggcagagacactggagttcaacgacgtctatcaggaggtgaaaggttccatgaatgatggtcgactgaggttgagccgtcagggcatcatcttcaagaatagcaagacaggcaaagtggacaacatccaggctggggagttaacagaaggtatctggcgccgtgttgctctgggccatggacttaaactgcttacaaagaatggccatgtctacaagtatgatggcttccgagaatcggagtttgagaaactctctgatttcttcaaaactcactatcgccttgagctaatggagaaggacctttgtgtgaagggctggaactgggggacagtgaaatttggtgggcagctgctttcctttgacattggtgaccagccagtctttgagatacccctcagcaatgtgtcccagtgcaccacaggcaagaatgaggtgacactggaattccaccaaaacgatgacgcagaggtgtctctcatggaggtgcgcttctacgtcccacccacccaggaggatggtgtggaccctgttgaggcctttgcccagaatgtgttgtcaaaggcggatgtaatccaggccacgggagatgccatctgcatcttccgggagctgcagtgtctgactcctcgtggtcgttatgacattcggatctaccccacctttctgcacctgcatggcaagacctttgactacaagatcccctacaccacagtactgcgtctgtttttgttaccccacaaggaccagcgccagatgttctttgtgatcagcctggatcccccaatcaagcaaggccaaactcgctaccacttcctgatcctcctcttctccaaggacgaggacatttcgttgactctgaacatgaacgaggaagaagtggagaagcgctttgagggtcggctcaccaagaacatgtcaggatccctctatgagatggtcagccgggtcatgaaagcactggtaaaccgcaagatcacagtgccaggcaacttccaagggcactcaggggcccagtgcattacctgttcctacaaggcaagctcaggactgctctacccgctggagcggggcttcatctacgtccacaagccacctgtgcacatccgcttcgatgagatctcctttgtcaactttgctcgtggtaccactactactcgttcctttgactttgaaattgagaccaagcagggcactcagtataccttcagcagcattgagagggaggagtacgggaaactgtttgattttgtcaacgcgaaaaagctcaacatcaaaaaccgaggattgaaagagggcatgaacccaagctacgatgaatatgctgactctgatgaggaccagcatgatgcctacttggagaggatgaaggaggaaggcaagatccgggaggagaatgccaatgacagcagcgatgactcaggagaagaaaccgatgagtcattcaacccaggtgaagaggaggaagatgtggcagaggagtttgacagcaacgcctctgccagctcctccagtaatgagggtgacagtgaccgggatgagaagaagcggaaacagctcaaaaaggccaagatggccaaggaccgcaagagccgcaagaagcctgtggaggtgaagaagggcaaagaccccaatgcccccaagaggcccatgtctgcatacatgctgtggctcaatgccagccgagagaagatcaagtcagaccatcctggcatcagcatcacggatctttccaagaaggcaggcgagatctggaagggaatgtccaaagagaagaaagaggagtgggatcgcaaggctgaggatgccaggagggactatgaaaaagccatgaaagaatatgaagggggccgaggcgagtcttctaagagggacaagtcaaagaagaagaagaaagtaaaggtaaagatggaaaagaaatccacgccctctaggggctcatcatccaagtcgtcctcaaggcagctaagcgagagcttcaagagcaaagagtttgtgtctagtgatgagagctcttcgggagagaacaagagcaaaaagaagaggaggaggagcgaggactctgaagaagaagaactagccagtactccccccagctcagaggactcagcgtcaggatccgatgagtagaaacggaggaaggttctctttgcgcttgccttctcacaccccccgactccccacccatattttggtaccagtttctcctcatgaaatgcagtccctggattctgtgccatctgaacatgctctcctgttggtgtgtatgtcactagggcagtggggagacgtcttaactctgctgcttcccaaggatggctgtttataatttggggagagatagggtgggaggcagggcaatgcaggatccaaatcctcatcttactttcccgaccttaaggatgtagctgctgcttgtcctgttcaagttgctggagcaggggtcatgtgaggccaggcctgtagctcctacctggggcctatttctactttcattttgtatttctggtctgtgaaaatgatttaataaagggaactgactttggaaaccaaaaaaa

SEQ ID NO: 2087 - DNA, 689 bp, Homo sapiens
tggcaccaggtgcccagtctcccagttgcgagggcaagcaaacccgtcatgagcaactcccttccccatctctgctcaccatgtggacgctgaaatcgtccctggtcctgcttctgtgcctcacctgcagctatgcctttatgttctcttctctgagacagaaaactagcgaaccccaggggaaggtgcaatacggagagcactttcggattcggcagaatctaccagagcacacccaaggctggcttgggagcaaatggctctggcttctttttgttgttgtgccgtttgtgatactgcagtgtcaaagagacagtgagaagaataaggagcagagtcctcctggccttcgaggcggccaacttcactctccattaaagaaaaaaagaaatgcttcccccaacaaagactgtgcattcaataccttaatggaactcgaggtggagcttatgaaatttgtgtccaaagtgcggaatcttaaacgtgccatggcaacaggtagtggcagtaacctcaggcttcgaaagtcagagatgcctgcagatccataccatgtcacgatctgtgaaatatggggagaagaaagctctagctgaatggatttgtgtgtcaggagagaaaaaagttgagtgttgacaaactgtatgcaaactaataaaactattctgaagaaaagaaaaaaaaaaaaa

SEQ ID NO: 2088 - DNA, 1413 bp, Homo sapiens
ttgtgattgtttttagtttgttagctgcctggagtgttattttaagaaagcagaagcaccatcatttgcacactccttatagatcacacaccttaaccctgactttttttgctccagtttttcagaagaagtgaagtcaagatgaagaaccatttgcttttctggggagtcctggcggtttttattaaggctgttcatgtgaaagcccaagaagatgaaaggattgttcttgttgacaacaaatgtaagtgtgcccggattacttccaggatcatccgttcttccgaagatcctaatgaggacattgtggagagaaacatccgaattattgttcctctgaacaacagggagaatatctctgatcccacctcaccattgagaaccagatttgtgtaccatttgtctgacctctgtaaaaaatgtgatcctacagaagtggagctggataatcagatagttactgctacccagagcaatatctgtgatgaagacagtgctacagagacctgctacacttatgacagaaacaagtgctacacagctgtggtcccactcgtatatggtggtgagaccaaaatggtggaaacagccttaaccccagatgcctgctatcctgactaatttaagtcattgctgactgcatagctctttttcttgagaggctctccattttgattcagaaagttagcatatttattaccaatgaatttgaaaccagggcttttttttttttttgggtgatgtaaaaccaactccctgccaccaaaataattaaaatagtcacattgttatctttattaggtaatcacttcttaattatatgttcatactctaagtatcaaaatcttccaattatcatgctcacctgaaagaggtatgctctcttaggaatacagtttctagcattaaacaaataaacaaggggagaaaataaaactcaaggactgaaaatcaggaggtgtaataaaatgttcctcgcattcccccccgcttttttttttttttttgactttgccttggagagccagagcttccgcattttctttactattctttttaaaaaaagtttcactgtgtagagaacatatatgcataaacataggtcaattatatgtctccattagaaaaataataattggaaaacatgttctagaactagttacaaaaataatttaaggtgaaatctctaatatttataaaagtagcaaaataaatgcataattaaaatatatttggacataacagacttggaagcagatgatacagacttctttttttcataatcaggttagtgtaagaaattgccatttgaaacaatccattttgtaactgaaccttatgaaatatatgtatttcatggtacgtattctctagcacagtctgagcaattaaatagattcataagcataaaaa

SEQ ID NO: 2089 - DNA, 4467 bp, Homo sapiens; identical to SEQ ID NO: 2063

SEQ ID NO: 2090 - DNA, 3032 bp, Homo sapiens
gtcacccgtaacaaccacaagtgccgtcgccgcgccccttccccctcccgcctccccggccccctccccggaaccggcggtcgagctacggtcgcggagcagtggaaccgagactgccccgcggagccgccggtatgagcgcccctcgccaccccgtgtcccaggcccggcctttctgacaagagctagacttcgggctccttgaggatattcagttttgtatgtttgaatatcctctcaccatgttcagcataaagtaccattcttaatgattatcctcaacaagacaggtgtgagagggttgctgttgtattgcaatcatggtgcagaaataccagtccccagtgagggtgtacaaatacccctttgaattaattatggctgcctatgaaaggaggttccctacatgtcctttgattccgatgttcgtgggcagtgacactgtgaatgaattcaagagcgaagatggggctattcatgtcattgaaaggcgctgcaagctggatgtagatgcacccagactgctgaagaagattgcaggagttgattatgtttattttgtccagaaaaactcactgaattctcgggaacgtactttgcacattgaggcttataatgaaacgttttccaatcgggtcatcattaatgagcattgctgctacaccgttcaccctgaaaatgaagattggacctgttttgaacagtctgcaagtttagatattaaatctttctttggttttgaaagtacagtggaaaaaattgcaatgaaacaatataccagcaacattaaaaaaggaaaggaaatcatcgaatactaccttcgccaattagaagaagaaggcataacctttgtgccccgttggagtccgccttccatcacgccctcttcagagacatcttcatcatcctccaagaaacaagcagcgtccatggccgtcgtcatcccagaagctgccctcaaggaggggctgagtggtgatgccctcagcagccccagcgcacctgagcccgtggtgggcacccctgacgacaaactagatgccgactacatcaagagatacctgggcgatttgactccgctgcaggagagctgcctcattagacttcgccagtggctccaggagacccacaagggcaaaattccaaaagatgagcatattcttcggttcctccgtgcacgggattttaatattgacaaagccagagagatcatgtgtcagtctttgacgtggagaaagcagcatcaggtagactacattcttgaaacctggacccctcctcaggtccttcaggattactacgcgggaggctggcatcatcacgacaaagatgggcggcccctctacgtgctcaggctggggcagatggacaccaaaggcttggtgagagcgctcggggaggaagccctgctgagatacgttctctccataaatgaagaagggctaaggcgatgcgaagagaatacaaaagtctttggtcggcctatcagctcatggacctgcctggtggacttggaagggctgaacatgcgccacttgtggagacctggtgtgaaagcgctgctgcggatcatcgaggtggtggaggccaactaccctgagacactgggccgccttctcatcctgcgggcgcccagggtatttcctgtgctctggacgctggttagtccgttcattgatgacaacaccagaaggaagttcctcatttatgcaggaaatgactaccagggtcctggaggcctgctggattacatcgacaaagagattattccagatttcctgagtggggagtgcatgtgcgaagtgccagagggtggactggtccccaaatctctgtaccggactgcagaggagctggagaacgaagacctgaagctctggactgagaccatctaccagtctgcaagcgtcttcaaaggagccccacatgagattctcattcagattgtggatgcctcgtcagtcatcacttgggatttcgacgtgtgcaaaggggacattgtgtttaacatctatcactccaagaggtcgccacaaccacccaaaaaggactccctgggagcccacagcatcacctctccgggtgggaacaatgtgcagctcatagacaaagtctggcagctgggccgcgactacagcatggtggagtcgcctctgatctgcaaagaaggagaaagcgtgcagggttcccatgtgaccaggtggccgggcttctacatcctgcagtggaaattccacagcatgcctgcgtgcgccgccagcagccttccccgggtggacgacgtgcttgcgtccctgcaggtctcttcgcacaagtgtaaagtgatgtactacaccgaggtgatcggctcggaggatttcagaggttccatgacgagcctggagtccagccacagcggcttctcccagctgagtgccgccaccacctcctccagccagtcccactccagctccatgatctccagatggcgattttgctgacagctgccaagaaaatgcttcactcaacagtcctcatgtgcccagagatgtttatagaactgtttgaattgcagccatcccctgccccctcccaggctgaagatctgttctttttaagttgattcgggagtggcattcttttatacccaaagactgtagtgcatcttgaagagctcaaagcacatgaccgcacaaatgcttacagggtttcctcccgagtaatccaatctcactccccttgtaagggaattctggggcagctatggtttgagtatgcagtttgcatcgtgtttctacctttagtaccttgccactcttttaaaacgctgctgtcatttcccatttcttagtactaatgattctttgattctccctctattatgtcttaattcactttccttcctaaatttgttatttgcatatcaaattctgtaaatgttttgtaaacatattacctcacttggtaatacaatactgatagtctttaaaagatttttttattgttatcaataataaatgtgaactatttaaagaaaaaaaaaaaaaaaaaaa

SEQ ID NO: 2091 - DNA, 1326 bp, Homo sapiens
tggacaaatttgcgggctggggaccatggaagtggaggaaatctacaagcaccaggaagtcaagatgcaagcaccagccttcagggacaagaaacagggggtctcagccaagaatcaaggtgcccatgacccagactatgagaatatcaccttggccttcaaaaatcaggaccatgcaaagggtggtcattcacgacccacgagccaagtcccagcccagtgcaggccgccctcagactccacccaggtcccctgctggttgtacagagccatcctgagcctgtacatcctcctggccctggcctttgtcctctgcatcatcctgtcagccttcatcatggtgaagaatgctgagatgtccaaggagctgctgggctttaaaagggagctttggaatgtctcaaactccgtacaagcatgcgaagagagacagaagagaggctgggattccgttcagcagagcatcaccatggtcaggagcaagattgatagattagagacgacattagcaggcataaaaaacattgacacaaaggtacagaaaatcttggaggtgctgcagaaaatgccacagtcctcacctcaataaatgagaggacattgtggcagccaaagccacaacttggaagatggggctgcacctgccaacgaagacgggaaatgaccccccccccccagcctagtgtgaacctgcccctcgtcccacgtatagaaaaacctcgagtcatggtgaatgagtgtctcggagttgctcgtgtgtgtgtacacctgcgtgcgtgtgtgtgcgtgtgtgcgcgtgtgttcgtgtatgtgcgtgtgtgcgtgcgcgtgtgtgtgcattttgcaaagggtggacatttcagtgtatctcccagaaaggtgatgaatgaataggactgagagtcacagtgaatgtggcatgcatgcctgtgtcatgtgacatatgtgagtctcggcatgtcacggtgggtggctgtgtctgagcacctccagcagatgtcactctgagtgtgggtgttggtgacatgcattgcacgggcctgtctccctgtttgtgtaaacatactagagtatactgcggcgtgttttctgtctacccatgtcatggtgggggagatttatctccgtacatgtgggtgtcgccatgtgtgccctgtcactatctgtggctgggtgaacggctgtgtcattatgagtgtgccgagttatgccaccctgtgtgctcagggcacatgcacacagacatttatctctgcactcacattttgtgacttatgaagataaataaagtcaagggaaaacagcgtcaaaaaaaaaaaaaaaaaa

SEQ ID NO: 2092 - DNA, 4576 bp, Homo sapiens
agcgagggccggagtggggctgaggcttcggtgcagagctggagagccgcggctgggaccggagtggggagcgcggcgtggaggtgccacccggcgcgggtggcggagagatcagaagcctcttccccaagccgagccaacctcagcggggacccgggctcagggacgcggcggcggcggcggcgactgcagtggctggacgatggcagcgtccgccggagccggggcggtgattgcagccccagacagccggcgctggctgtggtcggtgctggcggcggcgcttgggctcttgacagctggagtatcagccttggaagtatatacgccaaaagaaatcttcgtggcaaatggtacacaagggaagctgacctgcaagttcaagtctactagtacgactggcgggttgacctcagtctcctggagcttccagccagagggggccgacactactgtgtcgggcccagtcatatatgcacagttagaccactccggcggacatcacagtgacaagattaacaagtcagagtctgtggtgtatgcggatatccgaaagaattaagagaatacctagaacatatcctcagcaagaaacaaaaccaaactggactctcgtgcagaaaatgtagcccattaccacatgtagccttggagacccaggcaaggacaagtacacgtgtactcacagagggagagaaagatgtgtacaaaggatatgtataaatattctatttagtcatcctgatatgaggagccagtgttgcatgatgaaaagatggtatgattctacatatgtacccattgtcttgctgtttttgtactttcttttcaggtcatttacaattgggagatttcagaaacattcctttcaccatcatttagaaatggtttgccttaatggagacaatagcagatcctgtagtatttccagtagacatggccttttaatctaagggcttaagactgattagtcttagcatttactgtagttggaggatggagatgctatgatggaagcatacccagggtggcctttagcacagtatcagtaccatttatttgtctgccgcttttaaaaaatacccattggctatgccacttgaaaacaatttgagaagtttttttgaagtttttctcactaaaatatggggcaattgttagccttacatgttgtgtagacttactttaagtttgcacccttgaaatgtgtcatatcaatttctggattcataatagcaagattagcaaaggataaatgccgaaggtcacttcattctggacacagttggatcaatactgattaagtagaaaatccaagctttgcttgagaacttttgtaacgtggagagtaaaaagtatcggttttattctttgctgatgtcctttctgcttgaaataacagtcaccatacagctaaaggagaggagtttctttccttctaagtaggcagaaatggtatcattatgttgccgctctccaatctcccagagctcgctctctagagaatcaccttctttcgcttttttttttttttttgaggtagagtctcactatgttgcccagactagccttgaactcttgggctcaagtgattctccctcctcagcctcccgagtagctggaacgaactatagttgcaccactgcagctggcaagaatcaccttctttataaagcgtcagtcatgcttccagcaagaggcagcatcagtcatggctttataacagcttcatggtgcctcaaagactgttgaggttaatgagagcctagattagacagtttggctgtccttccctaaaacttgttttctcctattcactactccccaccgcacttaaaatctatgagtttttactttttactgggaatggaaagtgtggtgaagatcattcaacacttatgttgtcatttctcccattttctgaatttttttttaaatttccccccttttaaaattgttcgaaagcccacagttatggaaagaattactgtctagatggtctgcagaacgtgtttggggtgagtgggagtgaggggcaatgttactttttctccctgtagtttggagtccattatgagctgctgctttttcttctcatcttgtcatcttctggggatgtttgaaggctgagttccaacagaattcacaaagggaataaaacaggattgagattttgaggtgtgcacaaggtggtaagataaagggcatatgagcttcaaaactaatgctgttgcatacatgaagccttttgttttttgaggagctatttttgttattcttgtaacgctccaccttacatgccacatctgtgtgagtcaacagggatcaggtttggtcaccacacatgtctgaagctgggcagcgtctgctctgtgttctgtgtggaatggagaaaaaaacgcctgccctgctgccttccatgttcataggcccagcccaagagagtgacacacagtgctggccctgagacatttccacaaagtggtcaactctgccttgcatcctaaaactttttgggcatctattttgaaaactataggagcctttggaaggcctcttatgtttggaggggaagggtgttgagattgtcaccatccttcaagctgagactcctggtgagcctttgccaccatgaaaaccacatagctgaccagggctgtgcttgaggtacagaggacacacattgtagacaggcctgtgtcatgtttccttacagtcgttttttacagagaaaaggggcattgttttttcactgctttctcaacagttcctgtgaataaatgaaacatttcggagctccctgagagcaagagccttcacttcttcttgcggtgccgggaccatgtgttggtgaagctggtgctgtgggggccactcactcgaatgacacctggaggcctgttcctcccttaccactcccttccccagcccgacttcttggcctcctgcccaaccagacacctcaaactctgtcagtgccctggcattctggcagagaatcctcaccagttctcaccaaccttccccccaggcaagggcagctgccagcatggtgctctgccaggacaggtttccctgaaggaagctgctcacactgagatgagcctctcagggcaggacctcttcccaagccctgcacacccacccctgcagcccttttggctccccttttccctgtgcctcagcactcctttcctggttgcagataacgaactaaggttgcctaaagggcagatctgccctctccatgtcttcgtcctggcaaacagggtcgtcttaaaattatgcgctaattctgtatgggagcactcaaaaggcattacttagagattgaaatttcaaactatctctagtttttcaatggaaatatatcagctagggaaaaaccatcaagctcattattattttttgatcttcagttgtatttttgtgaatattttaatacatctttttcaatttctgaattgtgttgtgtgctcattttgaccagaatagaaaaagagatatgcctttcactcatatcattccagctacacctgccttcttttcttcaaaaatgccgtccgtgtgcctgcttctgggcctttgcacatgctgttccctgggcctgaagcatgccttctgccaatattcctgtggtttgctctctgacttcctttaagcctctgctcaaatgttacctcctcagggagaccttctgtgatatataaaagagcaagccccccaccccaccgcctcagccttcctggccccctcagttctgctctagttactctatttctctccctctttcccagtacacacttgtctgttctcccgcattagaacatagttaacaagagaccagaaccttgctgttttgttcactgctccgtctgcagtaaagggaacagcacctggcacttagctgctcaatacatgttacgtggatggatgagtaggtggaagcattcatccattcagcaacctacactgagaacaatcctgtgccaagcactgtgctaagcataaggaaacaaaacaagacaaagctcctcaaggagcttgccacagggtggaggtgacaggtgacatgaatggaagtaactagtagttaccaaatacttggtgtgagccaggcactttgcatttctttctctattatttctgtgagttaacagtaattgtactaatcttaatcccattgtttgaaagattatatggcttacccagggccacttagctaataaaggaacagagaagaggggctgggcctggggccgctgtttgatccacagccttgttcctaaccactatgccctgtggcctctcacaccaaaaggaagtaccaaactgcttccttactcaaataaatgtgctgaaatgcagttgcagttttctcccagtcccttaggagctggttagagagtcccttaggaacttgagagggtagtgtagtctaggtggtaggcacagatgtctgagagctttaacctcagtctggaagacaatgtggtgacttaatttgttgagaactatgttacaaataatgtgttactaataaaacattgaggcttcgcaaaaaaaaaaaaaaaaa

SEQ ID NO: 2093 - DNA, 2918 bp, Homo sapiens
cgaggttagggcccgcgttgcgacgtggtgcagcgcatattttcacaagtgggtctcccttgtccgggactatggccaccgactcgtgggccctggcggtggacgagcaggaagcggctgtcaagtcgatgaccaatttgcagatcaaggaagagaaagtcaaagcagataccaatggtattatcaaaaccagtaccactgccgagaaaacagatgaagaggagaaagaggacagagctgcccagtccttactcaacaagctgatcagaagcaaccttgttgataacacaaaccaagtggaagtcctgcaacgggatccaaactcccctctgtactcggtgaagtcgtttgaagagcttcggctgaaaccacagcttctccagggagtctatgccatgggcttcaatcgaccctccaagatacaagagaacgcattacccatgatgcttgctgaacccccacagaatctgattgcccagtctcagtctggcactggtaaaacagctgcctttgtcttagccatgctcagccgagtggagccatcagacagatacccccagtgtctgtgcctctccccaacatatgagctggcgcttcaaacaggaaaagtgattgagcagatgggcaaattttacccagaactgaagcttgcctatgccgttcgaggcaataaattggaaagaggccagaagatcagtgagcagattgtcattggcacccctgggaccgtgctggactggtgctccaagctcaagttcattgatcccaagaaaatcaaggtgtttgttctggatgaggctgatgtcatgatagccactcagggccaccaagatcagagcatccgcatccagaggatgctgcccaggaactgccagatgctgcttttctccgccacctttgaagactctgtgtggaagtttgcccagaaagtggtcccagacccaaatgttatcaaactgaagcgtgaggaagagaccctggataccatcaagcagtactatgtcctgtgcagcagcagagacgagaagttccaggccttgtgtaacctctacggggccatcaccattgctcaagccatgatcttctgccatactcgcaaaacagctagttggctggcagcagagctctcaaaagaaggccaccaggtggctctgctgagtggggagatgatggtggagcagagggctgcggtgattgagcgcttccgagagggcaaagagaaggttttggtgaccaccaacgtgtgtgcccgcggcattgatgttgaacaagtgtctgtcgtcatcaactttgatcttcccgtggacaaggacgggaatcctgacaatgagacctacctgcaccggatcgggcgcacgggccgctttggcaagaggggcctggcagtgaacatggtggacagcaagcacagcatgaacatcctgaacagaatccaggagcattttaataagaagatagaaagattggacacagatgatttggacgagattgagaaaatagccaactgagaagctccaccagccactgatgccagccctggcactgcccctgcacaggagacaagtgcatttagggcacaggccccgacatcaccccaaggacaacggcagaagtagagagaaactacctacctcacttcaaattatgtttggacttgacaaaaataggtgcaaatgatggggggcaatagaagaaaaaatttgcattttggaaaattgggtcctttccccacttttttaaagccacattcccccatctttataataatctggtcacagtggtagtcgctggccccaggaccccctcctgattttggctaggcatcgtggaaccagctccagcccctgaagaaacgatagatgtgcaggttgtgcggaagaggctgagtggaaaatggtgtgagccccaccgctgtgcatcgaatgagggaagtggcagcagagaggccagagctgccccctctctgtctcttcaatggacccttcacaagtgtttctcctgcccttggggctgtcttccttctcctgaaatccagagactttcttgctcatcccttctccctttcacttctgttctctgctgcagaaagcagacttgcatatccctgatgagcagctcggctacttttgtaaacttcagatttggagagaaacacgaaagtctgaatcctgaccccttgagagagagtgatctggcgagggccgatgaaggggctgggcctggtcttgccttctcttctctcggttgctccctctgcctaggcccctggtactcagtcacggcagccaggagaccccaggtgagtttctgagcgcatacgtagttggttcttacccccaggtgtcacacggggccgagagctgagcaagaatttggaatggaagttatgaccaagggaattatgctgttcatttataatagtggacattatggagagctctgattcctacataatatgaataaggatggataggccgggcgtggtggctcatgcctataatcccagcacgttgggaggctgaggcgggcggatcggttgagctcaggcgttcgggaccagcctggccaacatgatgaaaccccgtctctaccaaaaatagaaaaaaatatagccgggcctggtggcgcacgcctgtagtcccagctactcgggaggctgaggtaggaggatcgcttgagcctgggtagaggctgctgtgagctgaaatggcgccactgcactccagcctgggtaacagagcgagaccccgactcaataaataaataaggatggataaattgtagcgtatgcaccattcattatgctaagacattttaaagtaattatgagaaacgctctactaatgatttgtttttatttgtatttttctgcttattagacaaatatatactcattttaaaaaaaaaaaaaaaaaaaa

SEQ ID NO: 2094 - DNA, 2268 bp, Homo sapiens
aggagcacttccggggcagagcctgagagcgcgcgcgcacgtggggccggggcggagagaggcgagcaccgggaaggggagcgtggggccgctggaatgggtgaatttaaggtccatcgagtacgtttctttaattatgttccatcaggaatccgctgtgtggcttacaataaccagtcaaacagattggctgtttcacgaacagatggcactgtggaaatttataacttgtcagcaaactactttcaggagaaatttttcccaggtcatgagtctcgggctacagaagctttgtgctgggcagaaggacagcgactctttagtgctgggctcaatggcgagattatggagtatgatttacaggcgttaaacatcaagtatgctatggatgcctttggaggacctatttggagcatggctgccagccccagtggctctcaacttttggttggttgtgaagatggatctgtgaaactatttcaaattaccccagacaaaatccagtttgaaagaaattttgatcggcagaaaagtcgcatcctgagtctcagctggcatccctctggtacccacattgcagctggttccatagactacattagtgtgtttgatgtcaaatcaggcagcgctgttcataagatgattgtggacaggcagtatatgggcgtgtctaagcggaagtgcatcgtgtggggtgtcgccttcttgtccgatggcactatcataagtgtggactctgctgggaaggtgcagttctgggactcagccactgggacgcttgtgaagagccatctcatcgctaatgctgacgtgcagtccattgctgtagctgaccaagaagacagtttcgtggtgggcacagccgagggaacagtcttccattttcagctggtccctgtgacatctaacagcagtgagaagcagtgggtgcggacaaaaccgttccagcatcacactcatgacgtgcgcactgtggcccacagcccaacagcgctgatatctggaggcactgacacccacttagtctttcgtcctctcatggagaaggtggaagtaaagaattacgatgccgctctccgaaaaatcacctttccccaccgatgtctcatctcctgttctaaaaagaggcagcttctcctcttccagtttgctcatcacttagaactttggcgactgggatccacagttgcaacaggcaagaatggggatactcttccactctctaaaaatgcagatcatttactgcacctaaagacaaagggtcctgagaacattatctgtagctgtatctccccatgtggaagttggatagcctattctacagtttctcggttttttctctatcggctgaattatgaacatgacaacataagcctcaaaagggtttccaaaatgccagcattccttcgctctgcccttcagattttgttttctgaagattcaacaaagctctttgtagcatcaaatcaaggagctctgcatattgttcagctgtcaggaggaagcttcaagcacctgcatgctttccagcctcagtcaggaacagtggaggccatgtgtcttttggcagtcagtccagatgggaattggctagctgcatcaggtaccagtgctggagtccatgtctacaacgtaaaacagctaaagcttcactgcacggtgcctgcttacaatttcccagtgactgctatggctattgcccccaataccaacaaccttgtcatcgctcattcggaccagcaggtatttgagtacagcatcccagacaaacagtatacagattggagccggactgtccagaagcagggctttcaccacctttggctccaaagggatactcctatcacacacatcagttttcatcccaagagaccgatgcacatccttctccatgatgcctacatgttctgcatcattgacaagtcattgccccttccaaatgacaaaaccttactctacaatccatttcctcccacgaatgaatcagatgtcatccggaggcgcacagctcatgcttttaaaatttctaagatatataagcctctactcttcatggatcttttggatgaaagaacactcgtggcagtagaacggcctctggatgacatcattgctcagctcccaccacccattaaaaagaagaaatttggaacctaaaacagggcactgtctgtgtccttccttgaactgtctaccctgttgcttttcacaaatcatggtaataaaacaagttattcttgaggactagtcattaaaaaaaaaaaaaaa

SEQ ID NO: 2095 - DNA, 6046 bp, Homo sapiens
aggccccacccgctggtggcccggtccgcgtgtgcgccgactctcgcactctcctcgctccgggcgcccagactctgagagagagcgacggccatcatagaacagcgaaggcagtcgatcggcctgcggtccgcttcggcattcgcaggccgcaggcgggaggctagagcccccaggcgcacctcgccccaaccgcccgcggctcgggcagctctgcagagacgtcgtggcggcagggccagcacccattggtccgccacagccctccgccctccccctcgccacgcttattggccggagcggcggcgctcgccgggtaggcggtggcggcgtccctcccttgcgccggccctcaagaggcgacgaggaagcggccgcctccctgcgccccgcccctccggctagctcgctggctcccggctcctcccgacgtctcctacctcctcacggctcttcccggcgctctcctggctcccttctgccccagctccgtctcggcggcggcgggcagttgcagtggtgcagaatggctgacctcagtcttgcagatgcattaacagaaccatctccagacattgagggagagataaagcgggacttcattgccacactagaggcagaggcctttgatgatgttgtgggagaaactgttggaaaaacagactatattcctctcctggatgttgatgagaaaaccgggaactcagagtcaaagaagaaaccgtgctcagaaactagccagattgaagatactccatcttctaaaccaacactcctagccaatggtggtcatggagtagaagggagcgatactacagggtctccaactgaattccttgaagagaaaatggcctaccaggaatacccaaatagccagaactggccagaagataccaacttttgtttccaacctgagcaagtggtcgatcctatccagactgatccctttaagatgtaccatgatgatgacctggcagatttggtctttccctccagtgcgacagctgatacttcaatatttgcaggacaaaatgatcccttgaaagacagttacggtatgtctccctgcaacacagctgttgtacctcaggggtggtctgtggaagccttaaactctccacactcagagtcctttgtttccccagaggctgttgcagaacctcctcagccaacggcagttcccttagagctagccaaggagatagaaatggcatcagaagagaggccaccagcacaagcattggaaataatgatgggactgaagactactgacatggcaccatctaaagaaacagagatggccctcgccaaggacatggcactagctacaaaaaccgaggtggcattggctaaagatatggaatcacccaccaaattagatgtgacactggccaaggacatgcagccatccatggaatcagatatggccctagtcaaggacatggaactacccacagaaaaagaagtggccctggttaaggatgtcagatggcccacagaaacagatgtatcttcagccaagaatgtggtactgcccacagaaacagaggtagccccagccaaggatgtgacactgttgaaagaaacagagagggcatctcctataaaaatggacttagccccttccaaggacatgggaccacccaaagaaaacaagaaagaaacagagagggcatctcctataaaaatggacttggctccttccaaggacatgggaccacccaaagaaaacaagatagtcccagccaaggatttggtattactctcagaaatagaggtggcacaggctaatgacattatatcatccacagaaatatcctctgctgagaaggtggctttgtcctcagaaacagaggtagccctggccagggacatgacactgcccccggaaaccaacgtgatcttgaccaaggataaagcactacctttagaagcagaggtggccccagtcaaggacatggctcaactcccagaaacagaaatagccccggccaaggatgtggctccgtccacagtaaaagaagtgggcttgttgaaggacatgtctccactatcagaaacagaaatggctctgggcaaggatgtgactccacctccagaaacagaagtagttctcatcaagaacgtatgtctgcctccagaaatggaggtggccctgactgaggatcaggtcccagccctcaaaacagaagcacccctggctaaggatggggttctgaccctggccaacaatgtgactccagccaaagatgttccaccactctcagaaacagaggcaacaccagttccaattaaagacatggaaattgcacaaacacaaaaaggaataagtgaggattcccatttagaatctctgcaggatgtggggcagtcagctgcacctactttcatgatttcaccagaaaccgtcacaggaacggggaaaaagtgcagcttgccggccgaggaggattctgtgttagaaaaactaggggaaaggaaaccatgcaacagtcaaccttctgagctttcttcagagacctcaggaatagccaggccagaagaaggaaggcctgtggtgagtgggacaggaaatgacatcaccaccccaccgaacaaggagctcccaccaagcccagagaagaaaacaaagcctttggccaccactcaacctgcaaagacttcaacatcgaaagccaaaacacagcccacttctctccctaagcagccagctcccaccaccattggtgggttgaataaaaaacccatgagccttgcttcaggcttagtgccagctgccccacccaaacgccctgccgtcgcctctgccaggccttccatcttaccttcaaaagacgtgaagccaaagcccattgcagatgcaaaggctcctgagaagcgggcctcaccatccaagccagcttctgccccagcctccagatctgggtccaagagcactcagactgttgcaaaaaccacaacagctgctgctgttgcctcaactggcccaagcagtaggagcccctccacgctcctgcccaagaagcccactgccattaagactgagggaaaacctgcagaagtcaagaagatgactgcaaagtctgtaccagctgacttgagtcgcccaaagagcacctccaccagttccatgaagaaaaccaccactctcagtgggacagcccccgctgcaggggtggttcccagccgagtcaaggccacacccatgccctcccggccctccacaactcctttcatagacaagaagcccacctcggccaaacccagctccaccaccccccggctcagccgcctggccaccaatacttctgctcctgatctgaagaatgtccgctccaaggttggctccacggaaaacatcaagcatcagcctggaggaggccgggccaaagtagagaaaaaaacagaggcagctgctacaacccgaaagcctgaatctaatgcagtcactaaaacagccggcccaattgcaagtgcacagaaacaacctgcggggaaagtccagatagtctccaaaaaagtgagctacagccatattcagtccaagtgtggttccaaggacaatattaagcatgtccctggaggtggtaatgttcagattcagaacaagaaagtggacatctctaaggtctcctccaagtgtgggtctaaggctaacatcaagcacaagcctggtggaggagatgtcaagattgaaagtcagaagttgaacttcaaggagaaggcccaggccaaggtgggatccctcgataatgtgggccacctacctgcaggaggtgctgtgaagattgagacctacaggctgacgttccgggcaaatgccagggcccgcaccgaccacggggccgacattgtctcccgccccccacacttccctggcggccccaactcgggctcccgggtccttggccccctttcccgggctgtccactagaccagtgagcgcttgggcgccgtgctgggcagcccgctaggctcgccttccctcctgctttgcgtgcccggggcagcagcagccctgccccacacctcctctcactccccagcctgggcccatctccctgctttggtcttgccccatcactgcgccactgctccgtggaggaggttgggagggggttggggtggttgaggctaagttgggatctaggagaggagaaccagattctatcctcatctttttttggttctttggtccaaacccaaaagaaactgacatgccctcccttctccctggatctacctggagggaagagtggaggtggattccgagtggtgacaggacgctgaccgtggagcttaagccactgcctctccctctggtcccacaaatgggcgcccccccctccccatgcaggtggtgtcgggcccttcttgctgccctgccccaagttgggggtcagtgctgcctgtccccatgcttaacatacccgcctagctgctgtcacatttttcttgttttgtccttttatttttttctaataacctaaaaactggcaaaatagttctgcaggttgaagccatgtctacatgaaagtcctcagtaagtgttagagggaacagggcggagatatccttatgccacccccgctggaggatgtgggcagcttagggccctggaggcggtgcggcagggaagaggggtgcagaggctgtggctggtgagccggtcaggcacacaaggggcccttggagcgtggactggttggttttgccattttgttgtgtgtatgctgcttttcttttctaaccaagaggctggttttggcatctctgtcccattccctgggatctggtggtcagccctaggataaaaagccagggctggagaacaagaaagggccaggagatggaattccttcaggccggcacccacaccctaggacatgtaagccctcatgtccaagggagcctcatgcagatagtaggaaatcaggtctggaaatttaaaaataaaaggcatgagactaaggctatctgcttcccttatgccctgactggagaggggagggaggagaggcaaggcccacagagggcatcccagctaggccttgggatggctgcagtgaggagaaatcccgggaactgtattgacacaaagattcttattgcacttgtattttttgtattaaagtttgcatggtttctaataaaggattcaaacataagtttgtagtgaaatggcctgggagattccaagggcttctctggagggggattggctgcagtgtagatttgcctctgaggaggctgccccagacttggcctcctcatgccccctcctgacctctgcccttctctggtcctggcatccctggagaaggtaggggtcttgacctaagtttagatttgatctccatgtgcagggaggctgtcctgggcctgacaggtcctccccctttctgaggtagcagtgccttgtggaggtttgacaccatgtccctagctccccaagcacacaccaggaaactgcaggggctcacggaggaagtgctgcctgggccagggggaccagctttcctccgtagagaccatgtgcagaacacttctgctgtgccaagaacatgagggagccagtgttttgtcagcaggaagaaagggcctgctgggatgaaagtgggaaggaaacagggttgcgtagtcaggagacacctcaggggcaacagcacaggcccagagtacctgctgcctccactgcgtctgtcctggggtcatgaggatgctgaggttgacgacaggttccaggtcctttcactcctttggccaaaggttgggggtaggtggcccaagtggcgtgctctctaggtagacaacaggagtggtcagagttccctcaaaggatcctccactccagagcacctgagaaggccgggaccagaggccctgtgtgatgtgtactccgcagctgtttggggtgggacatttctgtacttctcgatttgcttatggctcagccattacctgtgtcagtccatgattctgttgtaacagttttaagagtaaataaataaagctgcctgatgtcccatcacgcagaaaaaaaaaa

SEQ ID NO: 2096 - DNA, 1879 bp, Homo sapiens
agttccaagtttggagcttttagctgccagccctggcccatcatgtagctgcagcacagccttccctaacgttgcaactgggggaaaaatcactttccagtctgttttgcaaggtgtgcatttccatcttgattccctgaaagtccatctgctgcatcggtcaagagaaactccacttgcatgaagattgcacgcctgcagcttgcatctttgttgcaaaactagctacagaagagaagcaaggcaaagtcttttgtgctcccctcccccatcaaaggaaaggggaaaatgtctcagtcgaaaggcaagaagcgaaaccctggccttaaaattccaaaagaagcatttgaacaacctcagaccagttccacaccacctcgagatttagactccaaggcttgcatttctattggaaatcagaactttgaggtgaaggcagatgacctggagcctataatggaactgggacgaggtgcgtacggggtggtggagaagatgcggcacgtgcccagcgggcagatcatggcagtgaagcggatccgagccacagtaaatagccaggaacagaaacggctactgatggatttggatatttccatgaggacggtggactgtccattcactgtcaccttttatggcgcactgtttcgggagggtgatgtgtggatctgcatggagctcatggatacatcactagataaattctacaaacaagttattgataaaggccagacaattccagaggacatcttagggaaaatagcagtttctattgtaaaagcattagaacatttacatagtaagctgtctgtcattcacagagacgtcaagccttctaatgtactcatcaatgctctcggtcaagtgaagatgtgcgattttggaatcagtggctacttggtggactctgttgctaaaacaattgatgcaggttgcaaaccatacatggcccctgaaagaataaacccagagctcaaccagaagggatacagtgtgaagtctgacatttggagtctgggcatcacgatgattgagttggccatccttcgatttccctatgattcatggggaactccatttcagcagctcaaacaggtggtagaggagccatcgccacaactcccagcagacaagttctctgcagagtttgttgactttacctcacagtgcttaaagaagaattccaaagaacggcctacatacccagagctaatgcaacatccatttttcaccctacatgaatccaaaggaacagatgtggcatcttttgtaaaactgattcttggagactaaaaagcagtggacttaatcggttgaccctactgtggattggtgggtttcggggtgaagcaagttcactacagcatcaatagaaagtcatctttgagataatttaaccctgcctctcagagggttttctctcccaattttctttttactccccctcttaagggggccttggaatctatagtatagaatgaactgtctagatggatgaattatgataaaggcttaggacttcaaaaggtgattaaatatttaatgatgtgtcatatgagtcctcaagcttctcagacttctcttattctttacaaaatgaatgcattggccctgacaaaaaggtgctacggtagtgatgaaattataagtagatttgtagtttgtcccatttattattttaatatttatgtttaagtgcttggttgaaaagattccattttatacaagaagggagattcaaaaaaaaaatataaggttgggttagcaatatttatagggcttttattttttaagttcaattgtgtctgtggtccagaagaaattatttaatatgcatctttgagaatattataaaaatatcaaaaaggaaaaaaaaaaa

SEQ ID NO: 2097 - DNA, 1714 bp, Homo sapiens; identical to SEQ ID NO: 2022

SEQ ID NO: 2098 - DNA, 1751 bp, Homo sapiens
gcggcgtcacagagcgcatgcgtgccgcgggggatgccgggagcgcgcagtggcggcagcggcggcgacggcagtaacagcggcagctacagcggggacgcgagcggggcggtgacggtgtgggaggtggtctcactcttgggaaaactgctgggcaccgtcgtcgcgctgaaggtggttctgtacctgctccgagtgtgcttagcgatggcctggaaatccggcggcgccagccactcggagctaatccacaatctccgcaaaaatggaatcatcaagacagataaagtatttgaagtgatgctggctacagaccgctcccactatgcaaaatgtaacccatacatggattctccacaatcaataggtttccaagcaacaatcagtgctccacacatgcatgcatatgcgctagaacttctatttgatcagttgcatgaaggagctaaagctcttgatgtaggatctggaagtggaatccttactgcatgttttgcacgtatggttggatgtactggaaaagtcataggaattgatcacattaaagagctagtagatgactcagtaaataatgtcaggaaggacgatccaacacttctgtcttcagggagagtacagcttgttgtgggggatggaagaatgggatatgctgaagaagccccttatgatgccattcatgtgggagctgcagcccctgttgtaccccaggcgctaatagatcagttaaagcccggaggaagattgatattgcctgttggtcctgcaggcggaaaccaaatgttggagcagtatgacaagctacaagatggcagcatcaaaatgaagcctctgatgggggtgatatacgtgcctttaacagataaagaaaagcagtggtccaggtggaagtgattttatcttctgctctttcttcttccacacatgcaagggatgaattgtaaaagcaacatcagcttgaccagtataaaattacagtggattgctcatctcagtcctcaaagctttttgaaaaccaacaccatcacagcttgttttggactttgttacactgttattttcagcatgaaaatgtgtgtttttttagggtttctgattcttcaaagaggcacagagccaaattggtagaggaaggatgcaaagtataaatttgtgtaatattactttaacatgcccatattttacttggaaatattaaaagaaagggttctgtaaaatggaaaacttagtttgtgaattgattttgaggagtggtttttcttttcttggacacttaattctgttctgatattaatttatcagattgcttttgtgcattggataacaccaccattcacaagttaagattcttggtatttggatatctgttagatgctactaagaaaatagagatgagctttctttttaaagcttttgatgtggtgtcatagaatagcatgttgtagatacaatcagctgctttgttaccttaaaactaggcatttgtaaatattaaaccataagatggcaggtgatgtcctgtaaacactcagctgttcagattggacataactgacttagttcttcccttctctctctctcaaaattataggagacttgtagtttagtgtggttttctgtttctaatttgctgctgataatgtatatgaacttaacatgctgtgtaagctgtgtcctagttcttgaacagtttatgcagtgctgctttgccaaataaagttaaaagtaaaagaggcaaaaaaaaaaaaaaaaaa

SEQ ID NO: 2099 - DNA, 248 bp, Homo sapiens
  misc_feature (177)..(177): n is a, c, g, or t
  misc_feature (180)..(181): n is a, c, g, or t
aaaagtcactgctctaatacaagaaaagtcccggttttaggtttcagaaacagaattttcccgaatgtttaaaatggtgaatggttccataaactgtgttaaccaggcttcttacaggctagtcccagaatctgaccaccatgtgcaatactgtttctaagaaaagtgtgctccaancannaaccttcaaacatttaacctgaatgaatgaatataacctcttcacggttcagtgttttcataagcaa

SEQ ID NO: 2100 - DNA, 339 bp, Homo sapiens
ctgtatattttatattttaaaaatatttaaaaaaatgtcgagatggggtctcactatgttgtccagactgatctcaaactcctgggctcaagtgatccacccaccttggccttccaaagtggtgggattatgggcaggagcctccgtgcccaggctgctgccattttcaaatttcctccctgcctcatgtgagaccacagggtttggagaagcagttggaacccacgtgtggtgatgcctcccacatcggcctgcttggggttctacaggggttgagggaccaggcctggccgagactgatggacagtggggactttccttctctccatgatggctttg

SEQ ID NO: 2101 - DNA, 5195 bp, Homo sapiens
gaggcggcagttccaggtgcaagcgccgggtttgctgcccgctgggcgcccctgcagcggcccgagctgtggccggcgtggatgaggggcaggcgaggcagggccgcccctccagtattgccgcccctcccgccccagggcagggctgggagggtacagcccgggggcgggctcgggtcgcctcccggccgccgcgtcctcgctgccccgggccgggcgggcgggcgccgagagcctcccagcccgccccgtgccccgcccgcccggctgcttccgcggcggcgctgcccgcacatgggctaggctgccaggatgttcagcttcgaaggcgacttcaagacgcggcccaaggtgtcccttggcggcgcgagcaggaaggaggaaaaggcttctcttttacatcgtactcaggaagaaagaagaaagagagaggaagaaaggcgaaggttgaaaaatgcaataattatccagtcatttattcgaggctatagagacagaaaacagcaatattccatccaaagaagtgcatttgatcgctgtgctaccttgtcacagtccgggggcgcttttcccattgctaatggccccaaccttacccttttggtaaggcagcttctgtttttttacaaacaaaatgaagactcaaaacgtttgatatggctgtatcagaacttaattaaacacagctctctgtttgtcaagcagttggatggatctgagagacttacatgcttatttcagataaaaagattgatgagcctctgttgcaggttgctgcaaaactgtaatgatgacagtttgaatgttgcacttccaatgagaatgcttgaagtattttcgtctgagaatacttacttgcctgttttacaagatgctagctatgtggtgtcagtgattgaacaaattttgcactacatgattcacaatgggtattataggtctctatatttgttgattaacagcaagcttccatcaagtattgaatattctgatttatctcgagttcctatagcaaaaattttgctagagaatgttctaaaaccattgcactttacttacaactcctgtccggaaggtgcgaggcaacaagtttttacagccttcacagaggagtttctggcagcaccttttacagatcagatttttcatttcatcattccggcgcttgcagatgcgcagaccgttttcccttacgagccctttctgaatgcactgttgttaatagagagtagatgttcaagaaagagtggtggagcaccctggcttttctatttcgttttaactgttggcgaaaattatttgggggccctctctgaggaagggctgctggtgtatttgcgggtgctgcagaccttcctctctcagttaccagtctctcctgccagcgcgagctgtcacgactcagccagtgactctgaggaggagagtgaagaagccgacaagccctcaagcccggaggatggcagactgtcagtatcatacataacagaggaatgcctgaagaagctggacacaaagcagcagaccaacaccctgctcaacctggtgtggagggactctgcgagcgaggaggtcttcaccaccatggcctccgtctgccacacgctgatggtgcagcaccgcatgatggtacccaaagtcaggcttctctacagtttagcctttaatgccaggtttctgagacatctttggtttctaatatcttccatgtcaacacggatgatcacagggtctatggtaccgttgcttcaggtgatatccaggggttctcctatgtcttttgaagattctagtcgaatcatcccactcttttatctttttagctccttgtttagtcattcactaatttccatacatgataacgaattcttcggtgatcccatagaagttgtaggtcaaagacaatcatcaatgatgccttttactttagaagagctgataatgttgtctcgatgccttcgagatgcatgcctggggatcatcaagttggcttatccagaaaccaagccagaagttcgagaagaatatattacagcatttcagagtattggagttactactagctctgaaatgcaacaatgcatacagatggaacagaaaagatggattcagttatttaaggttatcaccaatctagtgaaaatgttgaagtccagagacacgaggagaaatttttgtcctccaaaccactggctgtcagaacaagaagatattaaagcagataaggtcactcagctctatgtgccagcatccagacatgtgtggaggttccggcggatggggaggataggcccgctgcagtccaccctggacgtgggtttggagtccccgccgctgtctgtgtctgaggaaagacagcttgctgtcctgacagagttgccttttgtggttccatttgaggaacgagtaaagatctttcagaggttgatttatgcagataagcaagaagttcaaggagatggtccatttctggatggaattaatgtcacaataagaagaaattacatttatgaagatgcttatgacaaactttctccagaaaatgagcctgatttgaaaaagcggatccgtgtgcacttgctcaatgcccatggcctggatgaagctggcattgatggtggtggtattttcagagagtttttaaatgaactactgaagtcaggatttaaccccaaccaggggttctttaagactactaatgaagggcttctgtaccccaacccggctgctcagatgcttgtgggagattcttttgccagacattactacttcctaggcagaatgcttggaaaggctctctatgagaacatgctggtggagctgccctttgcaggcttctttctttccaagttgcttggaaccagtgccgacgtggacattcaccacctcgcctccctagaccctgaggtgtataagaatttgctctttctgaagagctacgaagacgatgtggaggagcttgggctgaacttcactgtggtgaacaatgacctgggagaggcgcaggtagttgaactaaaattcggtgggaaagacatccctgtcaccagcgccaaccggattgcgtacatccacttggtggcagactacaggctgaacaggcagatccgccagcactgcctggctttccgccagggccttgccaatgtcgtcagcctcgagtggctccgaatgtttgatcagcaagaaattcaggtattaatttctggtgcacaagttcccataagcctagaggacctaaaatcctttacaaactattcaggaggctattctgcagaccatcctgttattaaggtcttctggagagttgtggaagggttcactgatgaagaaaagcgcaaactgctgaagtttgtaacaagctgctctcgaccccctctcttggggtttaaggagttgtatcccgcattttgtattcacaacggaggctccgaccttgagcggctccccacagccagcacctgcatgaacctgctgaagctccccgagttctatgacgagacacttttgcgaagtaaacttctctatgcgattgaatgtgccgctggctttgagctgagctgaagctgatgctggggtcagacccctacagagaaccagtgcttccttcgtcagcagcgcctccccagacccacgaggatactcacactgcacgcctgaggctctcctaagctccttctttcattctgccattcctccctcccttccttttttaaatgatttttattacggtgtggtcacttatttagatggacattgcttttcaaataacttaaaataacacgttatgtgccatgtggctactttagtaatattgccaagaagagcacagtttttacactagtggcatctcagtgaaattaaccaaagatgaagctttggctttgctggtgagatcagagccctcctgagcaggcagcgccactccagggttcagacagggctgcacaggcggcagagatacagggtctgagggctgagacgccatggggccgctgctgcttatgtggttggattgtttacaagcctcattattaaaactgaaggcattttttttttctgctgcctttcccaaagtggttaggtttggaaaagagatgatgatggtaatattttatttgtgctttttaagccatttccccaaatgggactagcatgcttgttttcagtataccgtggcctgcctcatgatggtttggagatactgtctgtggatgtgaggtggggacttcattcattgtcctatttctatctccactttgtgcctggagagctttcaggggaggtggaggaggagggtctgccaagctactgcaacatctgtcacccactatacccagttacttgggggaggacagacactgtggtgtcattaaagttgtttgaaccaaagtggcggctgcatctttgtcccgatgctagccgtgccggtctcccatcatccgctcgccctcctttcccctgggctgcgcccacttgtcttcctggatatttgggggtgactcgccatgcttggcaccctctgcttcctggtgctgctctgactcgaagacgggacagtccctggtgcacatccagggaagaggagtgtcggtagttcttgcagtaggcactttatcaggacctgacctgttgctgggtgattttagtctctacaaacagaaagcgtttcaaagcgtcagctgtgggagcagagtgaccctttgctgatgctggggggaggggatctaaatcctcatttatctcttctatgtctcgtattttactgtcactggaggctctgtgggctgtcatagttaattgaccataattagcaatatacttttaaagtgggaaagctgaatgacacttttaagacaatgaacattatcaaaacaaaatgtataatttcttaatttgaataataaattaagcgtttaaatgctatttgtagtcttgatatacagaaataaaataattagggttggtcttttttattttaggttgttttatgttgaatgttctatatcttattagttaatttgtatattttattagtattttggaaatagcatatctgagactgaagagaaattgacaattcacttatttgtggtttttttctcagctattctgagcttatttatttatttgtatgttctaatggctaaacatttacattaaatgttttttttcccaagaaaaaaaaaaaaaaa

SEQ ID NO: 2102 - DNA, 2725 bp, Homo sapiens
agaatgctgagcagtcaacagcatttcttgttccaagatcacccttctgagtacctctctggctgccaaattgccagggccttcacagtttgattccatttctcagctccaagcattaggtaaacccaccaagcaatcctagcctgtgatggcgtttgacgtcagctgcttcttttgggtggtgctgttttctgccggctgtaaagtcatcacctcctgggatcagatgtgcattgagaaagaagccaacaaaacatataactgtgaaaatttaggtctcagtgaaatccctgacactctaccaaacacaacagaatttttggaattcagctttaattttttgcctacaattcacaatagaaccttcagcagactcatgaatcttacctttttggatttaactaggtgccagattaactggatacatgaagacacttttcaaagccatcatcaattaagcacacttgtgttaactggaaatcccctgatattcatggcagaaacatcgcttaatgggcccaagtcactgaagcatcttttcttaatccaaacgggaatatccaatctcgagtttattccagtgcacaatctggaaaacttggaaagcttgtatcttggaagcaaccatatttcctccattaagttccccaaagacttcccagcacggaatctgaaagtactggattttcagaataatgctatacactacatctctagagaagacatgaggtctctggagcaggccatcaacctaagcctgaacttcaatggcaataatgttaaaggtattgagcttggggcttttgattcaacgatcttccaaagtttgaactttggaggaactccaaatttgtctgttatattcaatggtctgcagaactctactactcagtctctctggctgggaacatttgaggacattgatgacgaagatattagttcagccatgctcaagggactctgtgaaatgtctgttgagagcctcaacctgcaggaacaccgcttctctgacatctcatccaccacatttcagtgcttcacccaactccaagaattggatctgacagcaactcacttgaaagggttaccctctgggatgaagggtctgaacttgctcaagaaattagttctcagtgtaaatcatttcgatcaattgtgtcaaatcagtgctgccaatttcccctcccttacacacctctacatcagaggcaacgtgaagaaacttcaccttggtgttggctgcttggagaaactaggaaaccttcagacacttgatttaagccataatgacatagaggcttctgactgctgcagtctgcaactcaaaaacctgtcccacttgcaaaccttaaacctgagccacaatgagcctcttggtctccagagtcaggcattcaaagaatgtcctcagctagaactcctcgatttggcatttacccgcttacacattaatgctccacaaagtcccttccaaaacctccatttccttcaggttctgaatctcacttactgcttccttgataccagcaatcagcatcttctagcaggcctaccagttctccggcatctcaacttaaaagggaatcactttcaagatgggactatcacgaagaccaacctacttcagaccgtgggcagcttggaggttctgattttgtcctcttgtggtctcctctctatagaccagcaagcattccacagcttgggaaaaatgagccatgtagacttaagccacaacagcctgacatgcgacagcattgattctcttagccatcttaagggaatctacctcaatctggctgccaacagcattaacatcatctcaccccgtctcctccctatcttgtcccagcagagcaccattaatttaagtcataaccccctggactgcacttgctcgaatattcatttcttaacatggtacaaagaaaacctgcacaaacttgaaggctcggaggagaccacgtgtgcaaacccgccatctctaaggggagttaagctatctgatgtcaagctttcctgtgggattacagccataggcattttctttctcatagtatttctattattgttggctattctgctattttttgcagttaaataccttctcaggtggaaataccaacacatttagtgctgaaggtttccagagaaagcaaataagtgtgcttagcaaaattgctctaagtgaaagaactgtcatctgctggtgaccagaccagacttttcagattgcttcctggaactgggcagggactcactgtgcttttctgagcttcttactcctgtgagtcccagagctaaagaaccttctaggcaagtacaccgaatgactcagtccagagggtcagatgctgctgtgagaggcacagagccctttccgcatgtggaagagtgggaggaagcagagggagggactgggcagggactgccggccccggagtctcccacagggaggccattccccttctactcaccgacatccctcccagcaccacacaccccgcccctgaaaggagatcatcagcccccacaatttgtcagagctgaagccagcccactacccacccccactacagcattgtgcttgggtctgggttctcagtaatgtagccatttgagaaacttacttggggacaaagtctcaatccttattttaaatgaaaaaagaaaagaaaagcataataaatttaaaagaaaaggctgagaaatgaaaaaaaaaaaa

SEQ ID NO: 2103 - DNA, 3699 bp, Homo sapiens
agagccaatggaaaggggctgccgcgcggccgtaaagagtttgtagaggcagttcgggtgcggtacgttgcattccggtaccggacgccgagagcggtttgtctccgtctctggagttgtaggcgagaggtgatcatgtccggtcgcgggaaacagggcggcaaagtgcgagcaaaggccaaatcccgctcctcccgcgcgggcctgcagttcccggtgggccgagtgcacagactgctgcgcaaagggaactacgcggagcgagtgggcgccggggcgccggtgtacctggcggcggtgttggagtaccttacggcggagatcctggagctggctggcaacgccgcgcgtgacaacaagaagaccaggataattccccgccacctgcagctcgccatccgcaacgacgaggagttaaacaagctgctgggcaaagtgaccatcgctcagggcggcgtcctgcccaacatccaggccgtgctgctgcccaagaagacggagagtcagaagacgaagagcaaatgaccctgacgccgccctcagggagctggctcccccagcaaaggcccttttcatggtcgtcccgcaatgcttttgaatgtgctggatgtcatggagggccggtgacatctagcggggaggtgggcggcgagggtcccggcgggagccaataaagttggtgaaaatcgtttggtcgagagagctgtgtagtcgcggggacatgtcggatggccccaggggaggggggcgaccgggaaacccctggagcaggcactggtgggtgggcttgagccactctggacggctttagtccgcaggtcaccctcgaggcgtcaggggagggtggcctggaggtgggcagggtggaagccacctcgctgtcagtagggcaaaggggaggcagagtcggtgcggtgaggcctccttcggaattatttttacttccctttcacagagccttcgctctcctgccagtttgtgagcactcaggaccaagttctgggaagataccgtcggatcgagctgagctcggggcaggaagtgtctgcggccatatttttcaaaaagtggagtaactttccgtcttggaagggtggctctgatggcacgatgtcaacttgagattcttcctagcctagtagctgctgtgctttcatgctttggatatcagatatctttatatagcacttttatgttcatattttttttttaatgaaggaaacgttcaataagtgagtcatgaggttggaaattcgttcccctgacagtcatattgcataacattgcagcgcctttagtcgtgggttacatatgcttgagcttttaaagtgatgttgtcaagtttctagcttcataatgatcctgtcttcatcatatcatattcactttgagaatcggtttgactttgctttcaaacaaaacaaaaacctcttgcttttaggggttcttacccaacaaataacctgtttgaactctcttatattctcccactagcctgaagcaatgacctcattccagtaatgtctttgggagttgcattgcctaatggcacaatattgctttaataaacatgtaaggaaagataggaccaaatatgtaagtgcagggggaaacacatttcagaccaggaatccacattgaaaagttaacactagtaatcatcttctgcccttaattgacactcctatttatttcatcctcagcaaatttcatcctggctcacagaccccacaaaaaagatcccagtacagatttcacatctttggattcatctttcctgtgagtcggaattgaagtcttccccaaaaatatatgtatatattgtatgtcttcatccttggtagcggctggcccattttcccacatggactttattttgtccccagtatttattgaacagctgtctatgccaggctctgtacaaagtgataggagtagagctgtgaatgaggccaaccagatttccactctctcggagctcactttatttttattggttcctgaagacgggacaaggaacaaatacatacgttaatatgagagatcagcttctgttagtacttgtacctctctgctgtgtgtggatgaatgatggaattacttctcccatgttgccatttttgaggtgtacaaaggtcaggccgtacacacctctgttaggaggcaaattattgggcaggttcgagatgttctgctatttactctgtggttttgtcatatgtaaaagtcataacacctgttttaaggattgagattgttcatttactgtgtgccacatattagacaataaatggaaaaaagtaccatgttcaatgggggtatgggtttatccttataggttaaattataggtaaacattaataggactttttaaaaaatgcctcattgttagaactactactcacagttaccacttggggtcagtggaacaaaatgcatatatggttttgacatttgagtctaaatttcttaaagggatgaggcatctgagggattgttaccaaaatgatgaagaaataaggacaagggacatcaagacattcataagaaaaagcacctttgccttcccctgggaagattcacaggaatctgtccagctcttattacatgatgagcaacatagacaagatacgaggcattgtaactgccctgtcgccacccgcctctcccaccactacccaaaggattcttagcatcccctcacatactctgcctgcctcaacgttcagtcagcccctcaccatttttgtttttgagagttttttttttaacccgaatagtttacgggctgtttaaaatgcatactcctacaaaatcagctcagcccatgatccatgatgaacaaacagtagttcttgctgatgtgtgattatgaatttaaaaggccagtatttctttaagcataagaccatatggaaaaaggcctaagacaaaatctgatgggaactgaattccagtttttaatagagttataatccatagttttatttacacacaaacacacacacacacactctttcctgcagagataagcaagccgttcagtgtggctgtggcttggccaggatttgtttgatctttgtttttcctgcagggccagtcttgtctttgtgtccccgaggactggtctgtttagttgtgcctgcctggaatcaaaaggcttagtcaggccccataattggtgatgactggcatactatatgcaaacttcacaatgccccttccagtggttgaaaggtcgcataccatgctgtgtaagaactttagctctctgcaatgagacttaaattcagattcactctactccttattagttatctgatttttggaaacttaatctctttaaacctcagtttcatctctaaaatgggcataatagtttacctcatagagtttggggagaattgagtgaattaatgtgtgtgaggacactaagattcccatatagaaataggctcaatgaatagtagctgtttttatttctatgtaaagtgagtagcggtagttgatgggagctgttgaaacaggtaaacagcattctagcaatccttcgacttttgtgatagcaaaccataaaaacaattttagtggctgttttactaattaaaggacatccacaattcaatgtataacagaaaaagtaatgattaaagcttgtgaatctgaaaaaaaaaaaaaaaaaaaaaaaaaaaaaaaaaa

SEQ ID NO: 2104 - DNA, 372 bp, Homo sapiens
cccttaacagaagaaaaacccaaatggcaaataaatacatgaaaatgaacatactgtccaccagattggctaattggagaaggtatgcataaatgagctcccatatattgctggtaaaaaccactatggaaaactttggcattagttagtgcaactgacaatatacatattcctatatccagccattctaaatcttaaacataaatagacaagttgacagcagtatattcataaaaagaaatacaaggagaaaagatacctttatatggaaaaaacattggtaaaaacattaaagaatcagacaaaaggatatgtaacatacgtttctgtttatagttcccaaacaggcaagattattatattttgtttagg

SEQ ID NO: 2105 - DNA, 2732 bp, Homo sapiens
ctttcgcctcagtctcgagctctcgctggccttcgggtgtacgtgctccgggatcttcagcacccgcggccgccatcgccgtcgcttggcttcttctggactcatctgcgccacttgtccgcttcacactccgccgccatcatggtgaagctcgcgaaggcaggtaaaaatcaaggtgaccccaagaaaatggctcctcctccaaaggaggtagaagaagatagtgaagatgaggaaatgtcagaagatgaagaagatgatagcagtggagaagaggtcgtcatacctcagaagaaaggcaagaaggctgctgcaacctcagcaaagaaggtggtcgtttccccaacaaaaaaggttgcagttgccacaccagccaagaaagcagctgtcactccaggcaaaaaggcagcagcaacacctgccaagaagacagttacaccagccaaagcagttaccacacctggcaagaagggagccacaccaggcaaagcattggtagcaactcctggtaagaagggtgctgccatcccagccaagggggcaaagaatggcaagaatgccaagaaggaagacagtgatgaagaggaggatgatgacagtgaggaggatgaggaggatgacgaggacgaggatgaggatgaagatgaaattgaaccagcagcgatgaaagcagcagctgctgcccctgcctcagaggatgaggacgatgaggatgacgaagatgatgaggatgacgatgacgatgaggaagatgactctgaagaagaagctatggagactacaccagccaaaggaaagaaagctgcaaaagttgttcctgtgaaagccaagaacgtggctgaggatgaagatgaagaagaggatgatgaggacgaggatgacgacgacgacgaagatgatgaagatgatgatgatgaagatgatgaggaggaggaagaagaggaggaggaagagcctgtcaaagaagcacctggaaaacgaaagaaggaaatggccaaacagaaagcagctcctgaagccaagaaacagaaagtggaaggcacagaaccgactacggctttcaatctctttgttggaaacctaaactttaacaaatctgctcctgaattaaaaactggtatcagcgatgtttttgctaaaaatgatcttgctgttgtggatgtcagaattggtatgactaggaaatttggttatgtggattttgaatctgctgaagacctggagaaagcgttggaactcactggtttgaaagtctttggcaatgaaattaaactagagaaaccaaaaggaaaagacagtaagaaagagcgagatgcgagaacacttttggctaaaaatctcccttacaaagtcactcaggatgaattgaaagaagtgtttgaagatgctgcggagatcagattagtcagcaaggatgggaaaagtaaagggattgcttatattgaatttaagacagaagctgatgcagagaaaacctttgaagaaaagcagggaacagagatcgatgggcgatctatttccctgtactatactggagagaaaggtcaaaatcaagactatagaggtggaaagaatagcacttggagtggtgaatcaaaaactctggttttaagcaacctctcctacagtgcaacagaagaaactcttcaggaagtatttgagaaagcaacttttatcaaagtaccccagaaccaaaatggcaaatctaaagggtatgcatttatagagtttgcttcattcgaagacgctaaagaagctttaaattcctgtaataaaagggaaattgagggcagagcaatcaggctggagttgcaaggacccaggggatcacctaatgccagaagccagccatccaaaactctgtttgtcaaaggcctgtctgaggataccactgaagagacattaaaggagtcatttgacggctccgttcgggcaaggatagttactgaccgggaaactgggtcctccaaagggtttggttttgtagacttcaacagtgaggaggatgccaaagctgccaaggaggccatggaagacggtgaaattgatggaaataaagttaccttggactgggccaaacctaagggtgaaggtggcttcgggggtcgtggtggaggcagaggcggctttggaggacgaggtggtggtagaggaggccgaggaggatttggtggcagaggccggggaggctttggagggcgaggaggcttccgaggaggcagaggaggaggaggtgaccacaagccacaaggaaagaagacgaagtttgaatagcttctgtccctctgctttcccttttccatttgaaagaaaggactctggggtttttactgttacctgatcaatgacagagccttctgaggacattccaagacagtatacagtcctgtggtctccttggaaatccgtctagttaacatttcaagggcaataccgtgttggttttgactggatattcatataaactttttaaagagttgagtgatagagctaacccttatctgtaagttttgaatttatattgtttcatcccatgtacaaaaccattttttcctacaaatagtttgggttttgttgttgtttcttttttttgttttgtttttgttttttttttttttgcgttcgtggggttgtaaaagaaaagaaagcagaatgttttatcatggtttttgcttcagcggctttaggacaaattaaaagtcaactctggtgccagaaaaaaaaaaaaaaaa

SEQ ID NO: 2106 - DNA, 3958 bp, Homo sapiens; identical to SEQ ID NO: 1441

SEQ ID NO: 2107 - DNA, 1497 bp, Homo sapiens; identical to SEQ ID NO: 331

SEQ ID NO: 2108 - DNA, 396 bp, Homo sapiens
actccgccttccacgtgcacccactgcctcttcccttctcgcttgggaactctagtctcgcctcgggttgcaatggaccccaactgctcctgtgccgctggtgtctcctgcacctgcgccagctcctgcaagtgcaaagagtgcaaatgcacctcctgcaagaagagctgctgctcctgctgccctgtgggctgtgccaagtgtgcccaaggctgcatctgcaaaggggcatcggagaagtgcagctgctgcgcctgatgtcgggacagccctgctcccaagtacaaatagagtgacccgtaaaatctaggattttttgttttttgctacaatcttgacccctttgctacattcccttttttctgtgaaatatgtgaataataattaaacacttag

SEQ ID NO: 2109 - DNA, 429 bp, Homo sapiens
atgagtcagaccctgtcaggacacagcatggacatgagggtccccgctcagctcctggggctcctgctgctctggctcccaggtaccagatgtgacatccagatgacccagtctccatcctccctgtctgcatctgtaggagacagagtcaccatcacttgccgggcgagtcagggcattagcaattctttagcctggtatcagcagaaaccagggaaagcccctaagctcctgctctatgctgcatccagattggaaagtggggtcccatccaggttcagtggcagtggatctgggacggattacactctcaccatcagcagcctgcagcctgaagattttgcaacttattactgtcaacagtattatagtacccctcccacagtgttacacacccgaacaaaaacccccagggaaagagatgtgtga

SEQ ID NO: 2110 - DNA, 2156 bp, Homo sapiens
gcgcatgcgtggattgtcgtcttctgtccaagttggtcgcttccctgcgccaaagtgagcagtagccaacatgtcagggtgggagtcatattacaaaaccgagggcgatgaagaagcagaggaagaacaagaagagaaccttgaagcaagtggagactataaatattcaggaagagatagtttgatttttttggttgatgcctccaaggctatgtttgaatctcagagtgaagatgagttgacaccttttgacatgagcatccagtgtatccaaagtgtgtacatcagtaagatcataagcagtgatcgagatctcttggctgtggtgttctatggtaccgagaaagacaaaaattcagtgaattttaaaaatatttacgtcttacaggagctggataatccaggtgcaaaacgaattctagagcttgaccagtttaaggggcagcagggacaaaaacgtttccaagacatgatgggccacggatctgactactcactcagtgaagtgctgtgggtctgtgccaacctctttagtgatgtccaattcaagatgagtcataagaggatcatgctgttcaccaatgaagacaacccccatggcaatgacagtgccaaagccagccgggccaggaccaaagccggtgatctccgagatacaggcatcttccttgacttgatgcacctgaagaaacctgggggctttgacatatccttgttctacagagatatcatcagcatagcagaggatgaggacctcagggttcactttgaggaatccagcaagctagaagacctgttgcggaaggttcgcgccaaggagaccaggaagcgagcactcagcaggttaaagctgaagctcaacaaagatatagtgatctctgtgggcatttataatctggtccagaaggctctcaagcctcctccaataaagctctatcgggaaacaaatgaaccagtgaaaaccaagacccggacctttaatacaagtacaggcggtttgcttctgcctagcgataccaagaggtctcagatctatgggagtcgtcagattatactggagaaagaggaaacagaagagctaaaacggtttgatgatccaggtttgatgctcatgggtttcaagccgttggtactgctgaagaaacaccattacctgaggccctccctgttcgtgtacccagaggagtcgctggtgattgggagctcaaccctgttcagtgctctgctcatcaagtgtctggagaaggaggttgcagcattgtgcagatacacaccccgcaggaacatccctccttattttgtggctttggtgccacaggaagaagagttggatgaccagaaaattcaggtgactcctccaggcttccagctggtctttttaccctttgctgatgataaaaggaagatgccctttactgaaaaaatcatggcaactccagagcaggtgggcaagatgaaggctatcgttgagaagcttcgcttcacatacagaagtgacagctttgagaaccccgtgctgcagcagcacttcaggaacctggaggccttggccttggatttgatggagccggaacaagcagtggacctgacattgcccaaggttgaagcaatgaataaaagactgggctccttggtggatgagtttaaggagcttgtttacccaccagattacaatcctgaagggaaagttaccaagagaaaacacgataatgaaggttctggaagcaaaaggcccaaggtggagtattcagaagaggagctgaagacccacatcagcaagggtacgctgggcaagttcactgtgcccatgctgaaagaggcctgccgggcttacgggctgaagagtgggctgaagaagcaggagctgctggaagccctcaccaagcacttccaggactgaccagaggccgcgcgtccagctgcccttccgcagtgtggccaggctgcctggccttgtcctcagccagttaaaatgtgtttctcctgagctaggaagagtctacccgacataagtcgagggactttatgtttttgaggctttctgttgccatggtgatggtgtagccctcccactttgctgttccttactttactgcctgaataaagagccctaagtttgtactatatactgttaaaaaaaaaaaaaaaaaaaaaaa

SEQ ID NO: 2111 - DNA, 4941 bp, Homo sapiens
accttcgcggccgcaactcgctcggccgccgccatcttgcgagctcgtcgtactgaccgagcggggaggctgtcttgaggcggcaccgctcaccgacaccgaggcggactggcagccctgagcgtcgcagtcatgccggccggacccgtgcaggcggtgcccccgccgccgcccgtgcccacggagcccaaacagcccacagaagaagaagcatcttcaaaggaggattctgcaccttctaagccagttgtggggattatttaccctcctccagaggtcagaaatattgttgacaagactgccagctttgtggccagaaacgggcctgaatttgaagctaggatccgacagaacgagatcaacaaccccaagttcaactttctgaaccccaatgacccttaccatgcctactaccgccacaaggtcagcgagttcaaggaagggaaggctcagtttgtggccaggaatgggcgccagtttctgacccagctgatgcagaaagagcagcgcaactaccagtttgactttctccgcccacagcacagcctcttcaactacttcacgaagctagtggaacagtacaccaagatcttgattccacccaaaggtttattttcaaagctcaagaaagaggctgaaaacccccgagaagttttggatcaggtgtgttaccgagtggaatgggccaaattccaggaacgtgagaggaagaaggaagaagaggagaaggagaaggagcgggtggcctatgctcagatcgactggcatgattttgtggtggtggaaacagtggacttccaacccaatgagcaagggaacttccctccccccaccacgccagaggagctgggggcccgaatcctcattcaggagcgctatgaaaagtttggggagagtgaggaagttgagatggaggtcgagtctgatgaggaggatgacaaacaggagaaggcggaggagcctccttcccagctggaccaggacacccaagtacaagatatggatgagggttcagatgatgaagaagaagggcagaaagtgcccccacccccagagacacccatgcctccacctctgcccccaactccagaccaagtcattgtccgcaaggattatgatcccaaagcctccaagcccttgcctccagcccctgctccagatgagtatcttgtgtcccccattactggggagaagatccccgccagcaaaatgcaggaacacatgcgcattggacttcttgaccctcgctggctggagcagcgggatcgctccatccgtgagaagcagagcgatgatgaggtgtacgcaccaggtctggatattgagagcagcttgaagcagttggctgagcggcgtactgacatcttcggtgtagaggaaacagccattggtaagaagatcggtgaggaggagatccagaagccagaggaaaaggtgacctgggatggccactcaggcagcatggcccggacccagcaggctgcccaggccaacatcaccctccaggagcagattgaggccattcacaaggccaaaggcctggtgccagaggatgacactaaagagaagattggccccagcaagcccaatgaaatccctcaacagccaccgccaccatcttcagccaccaacatccccagctcggctccacccatcacttcagtgccccgaccacccacaatgccacctccagttcgtactacagttgtctccgcagtacccgtcatgccccggcccccaatggcatctgtggtccggctgcccccaggctcagtgatcgcccccatgccgcccatcatccacgcgcccagaatcaacgtggtgcccatgcctccctcggcccctcctattatggccccccgcccaccccccatgattgtgccaacagcctttgtgcctgctccacctgtggcacctgtcccagctccagccccaatgccccctgtgcatcccccacctcccatggaagatgagcccacctccaaaaaactgaagacagaggacagcctcatgccagaggaggagttcctgcgcagaaacaagggtccagtgtccatcaaagtccaggtgcccaacatgcaggataagacggaatggaaactgaatgggcaggtgctggtcttcaccctcccactcacggaccaggtctctgtcattaaggtgaagattcatgaagccacaggcatgcctgcagggaaacagaagctacagtatgagggtatcttcatcaaagattccaactcactggcttactacaacatggccaatggcgcagtcatccacctggccctcaaggagagaggcgggaggaagaagtagacaagaggaacctgctgtcaagtccctgccattttgcctctcctgtctcccaccccctgccccagacccaggagcccccctgaggctttgccttgcctgcatatttgtttcgctcttactcagtttgggaattcaaattgtcctgcagaggttcattcccctgaccctttccccacattggtaagagtagctgggttttctaagccactctctggaatctctttgtgttagggtctcgatttgaggacattcatttcttcagcagcccattagcaactgagagcccagggatgtcctacaggatagtttcatagtgacaggtggcacttggctaatagaatatggctgatattgtcattaatcattttgtaccttgacatgggttgtctaataaaactcggacccttcttgtgaaatcagttaaataagacttgtctcggtcacctgtgccctgtccagactcgaggcagtggtaacactgcacagtgctatgtggcttctctttgaggatttttgggttttgtaactaaattcttgctgccctcatactttttatgtattagaatcatattcgtattgcccttttaaaacattgggatcctccaaaggcctgccccatgtatttaacagtaatacaggaagcatggcaggcaccatgcaaaccaaggatggatggtgcagtccctgtgtcagtgggcggtggtttcctgctggcctggaatcactcatcacctgattgattggctctgtggtcctgggcaggtgcctcataggtgtgtggatatgatgacgtttctttaaaatgtatgtatttaacaaatacttaattgtattaaggtcatgtaccaaggatttgataaagtttaaataatttactctctacttttatccattttatccattttaactcatgtaatcctcatgtgagtattcctgtttaacacttgagtaaactgaggcacagagaacataagttgcatgccatagtcacacactgtgaaagtgaaaagagaatgtgtgcaaaacacgtcacagtcctggtttctgagtaaaggcaggctgttatctttagaatcaagctatcacagggagataggcaatgctgtgggtgttggaggaaggtgagagcctgttgctaacaatttcctggttttaaagctaaggctgattttattgggaagatctcacatgtgtgtggcccctgagagttcccagtgccttttatttgcagtccttccatttggacctcctagctgccccatcaggtcatctccagggctcagaggggtgagaccatttcccaaggtcacagaaccagctctctagtcaccaccctgcctctccctctcacccagagtcagtaccagttttatggctttattacaaactgctgggtccctcccattttcaacttgattgatgggatgtcatcccttatcctgtctgacatttgcctctggcctggttgctagaagtttgccccaggggcaagagttgaaatttggcttcctgaggtgggctttgtggtttgcgtccctaaagtgagcccactactggttgcttgtccatggccaacaccagaaatcccctgagcactacctgggtctcattccaagaaggaagagggtcaggagacctggggagtctcatattccaagttcttctttctttctgggagcagtgggcagttcatggtgttagggcactcacccccacagactggcaaaccctgcaggacttccgtggctgaggctgtgaccggaggccaggaatgccgttgggtggattgtgagtgaatgggccctttgagctgccctctagagagcaaatccagtttcctggagctcctgaatgaatatctgtactggctcgctcagatgcagaagctccattgaccatgaggccttgtgaacatcagtggccacaggcccagtgtgctgcttggcactgcactagtttaggacctgcagcatgtaggtagcgtcctagtgtttataatacaaagctgctctgcacagcttttctgattcttcttgcaatctcctgaggattatctgccccatttttaaaacgaggtggaatacccaaggtcatgtagccagtgagtgctctggaaagccaaagcagctcatcccttcctggggaccacactgctctgctccaccagaccacactatgaaataggaataagtgctcctgttgcaggactgctgggaaaacaggtggtgtgggacttaagtcaccataattttgaagacttgcatgcagagggctccaggaattgtagacattaaggaatttcactttcagttctacccactacttaagtacttgtcatgtactcttagaggaggccagtaatgatcagaaccattttactttaaaattaataatattgtattagagaatatattaaatggttatattgggttatgttaggatatatacttgaatggaaatacatgtactattagcaatcatatttcatttatccctgtaattagacaagaaagcataatatagctctactcatgggtacacataccagtgtataagatttttagaagtttactttttaaaaataaaagcaaaatgtaagatcttaaaaaaaaaaaaaaaaaa

SEQ ID NO: 2112 - DNA, 5345 bp, Homo sapiens
agtccctatttggaactgctctcgcggcagttcagacctcgtgctcgtccccttcgcctgtctgtgtgtggtatccgtaggtccggggcacttttttttttggtgtgtgtgtgtgtgcgtgcgcgcgtgtgtgtgtgttgggtgtgtgtgttttgggggtttgccggggcgcggagaggagagccgggccgaggggaaggaaggaagccgtagagctccccggtctcgggctgcgtctcccctccagcgctctcctgcctgtgcgctccgacgcggcagcggcggtggcgctgagcgctcctcggtggggacgcggtgctcaagctgggagcagcgagaaccctttgcggaggcttcccgtgcccgctggacttaggatgccagggcgtttgatttgcacctactgagcccggagttcctccccggccctgggaagggcttgcagcggcggcggcggcggcggcagcggcagtagcagacggaacagcaggctctcctctccgagggggggcgtcgaagcgcccgcgccgggctcccgccctcaccctccggcgctcctgcggccccaagccaccacctcgtagcccgcctccttcctcttctcgccgcgagccccaggcccggacgcctctaggatcggacccgcgcgccccggatgcttggggctgccccggcgcgcccccctacaggcgcgacccgctgagtgacccggagggggcccgagctcgccccaggaggggcccccggcctcgggaccccgcgccggacctgctggggagccgacgatgtccgcgcagtcccaggcattgacgcgctcgacgcagcccagggaaggcggccggccgctgcccgccgagccctaggcgcacaaagcccgcgcccgccgcccggccccggcgcccgccgacgactttgccgcctgctccgcggctctttgtctccacttggggcgggcgcccgactctgggatttcgctgcgagaacgagctgggggggccgggggcgagctctcggtttcccggccgccccccgctcgggctcggctcccccctcccccgcacctccccggcccgggctctcggcgcttccacgctctcggaatcacgacccctccctgccatgtatccgcagggcagacatccggctccccatcaacccgggcagccgggatttaaattcacggtggctgagtcttgtgacaggatcaaagacgaattccagttcctgcaagctcagtatcacagcctcaaagtggagtacgacaagctggcaaacgagaagacggagatgcagcgccattatgtgatgtactatgagatgtcctatggcttgaacattgaaatgcacaagcagacagagattgcgaagagactgaacacaattttagcacagatcatgcctttcctgtcacaagagcaccagcagcaggtggcgcaggcagtggagcgcgccaagcaggtcaccatgacggagctgaacgccatcatcgggcagcagcagctccaggcgcagcacctctcccatgccacacacggccccccggtccagttgccaccccacccgtcaggtctccagcctccaggaatccccccagtgacagggagcagctccgggctgctggcactgggcgccctgggcagccaggcccatctgacggtgaaggatgagaagaaccaccatgaactcgatcacagagagagagaatccagtgcgaataactctgtgtcaccctcggaaagcctccgggccagtgagaagcaccggggctctgcggactacagcatggaagccaagaagcggaaggcggaggagaaggacagcttgagccgatacgacagtgatggagacaagagtgatgatctggtggtggatgtttccaatgaggaccccgcaacgccccgggtcagcccggcacactcccctcctgaaaatgggctggacaaggcccgtagcctgaaaaaagatgcccccaccagccctgcctcggtggcctcttccagtagcacaccttcctccaagaccaaagaccttggtcataacgacaaatcctccacccctgggctcaagtccaacacaccaaccccaaggaacgacgccccaactccaggcaccagcacgaccccagggctcaggtcgatgccgggtaaacctccgggcatggacccgatagcctcggctctgcgcacgcccatctccatcaccagctcctatgcggcgcccttcgccatgatgagccaccatgagatgaacggctccctcaccagtcctggcgcctacgccggcctccacaacatcccaccccagatgagcgccgccgccgctgctgcagccgctgcctatggccgatcgccaatggtgagctttggagctgttggttttgaccctcaccccccgatgcgggccacaggcctcccctcaagcctggcctccattcctggaggaaaaccagcgtactcattccatgtgagtgctgatgggcagatgcagcccgtgcccttcccccacgacgccctggcaggccccggcatcccgaggcacgcccggcagatcaacacactcagccacggggaggtggtgtgtgccgtgaccatcagcaaccccacgaggcacgtctacacaggtggcaagggctgcgtgaagatctgggacatcagccagccaggcagcaagagccccatctcccagctggactgcctgaacagggacaattacatccgctcctgcaagctgctccctgatgggcgcacgctcatcgtgggcggcgaggccagcacgctcaccatctgggacctggcctcgcccacgccccgcatcaaggccgagctgacgtcctcggctcccgcctgttatgccctggccattagccctgacgccaaagtctgcttctcctgctgcagcgatgggaacattgctgtctgggacctgcacaaccagaccctggtcaggcagttccagggccacacagatggggccagctgcatagacatctcccatgatggcaccaaactgtggacagggggcctggacaacacggtgcgctcctgggacctgcgggagggccgacagctacagcagcatgacttcacttcccagatcttctcgctgggctactgccccactggggagtggctggctgtgggcatggagagcagcaacgtggaggtgctgcaccacaccaagcctgacaagtaccagctgcacctgcacgagagctgcgtgctctccctcaagttcgcctactgcggcaagtggttcgtgagcactgggaaagataaccttctcaacgcctggaggacgccttatggagccagcatattccagtctaaagaatcctcgtctgtcttgagttgtgacatttcagcggatgacaaatacattgtaacaggctctggtgacaagaaggccacagtttatgaggtcatctactaaacaagaactccagcagggctgtcaaactctgggagaaaccgactcggctctgacagggagacccccaggcgaggggccccgaggatggcggaggatgggccgcaggcagccgagcgttcagggctgcgctccggccggctgagagggcacgtgccccgtcacagtctggactcctgggcctggattgatgtgtctcacagactcggaagggttctgctcctcctcctccccctgaacaatgctggcagttgctacaaatagatttattggaggcttatggctccggttcccccacagacccgctcatgagtctctgtttgttcttcccttttcttttgccctgtccctcaccttgggtcgggggtgctggagtggaccacaatgttgtgctgggggatgggggggtctctctttgccgattgtgcagtgcacaagatttgtgaaaaatgtaaataacagactcctattgcggactgatcagtgggagaggaggccccttcccaccggaaactctgagtgtgtatttcgcctgctgtatttgtaatccactcgtggtggtggcttttttttttttttttttttaaataaacagatgctctcacctgggaagaggagacagggaggggaaccaattgaagaaagaggagaaaagtcttagagtgtggaaaaggcaaccaggttggccgtaaggtgcctgctggaatgcgtgtgcctccacacgggtctgggcatccggactgataaccagccggccagactgagggatggaaggcactgagatgggggcccgtccaggcggacacccgcagaaatggagctttctgtggtctcttgcactctggctgcctcttgccctctctgtgtctctctttcttggtctctccctctctcctcctcagcctggtctttctctttggtgcacacttagttattgttgtgagcaatggaagttcaaaggaactccctctccagctcttctgaatcttgggacacagcctaaaaaggacaaaaagttagaagacagcatagcaactcagctcagggagctaccagagaaaaatagcaactgatgtgggtgctttttttttttttttaatttgaataaaaagaattagaagtgatgtccttttataaaatgccttctcccccttcccgcctacagtctcttcctctccccttagaggggggaaagtgtataaacctacagggttgtgagtctgaaaagaggatccccctcacccccaccctgggcagagcagtgggggttggggggtgggagagggggacacagatcctggcacactgtggatatttcttgcagattgcagtctcttgtggcccaaacaggttaggtagactatcgcctctggcaggtgccaccttttggtaccaacatgttctgaggtgttaggatttgggttgggttttttttgtttgttttttttttccttttggtctttttttttttctccttttaaagaaaagctaaaggccgctgtgagtcctggtggcaggctctccatggatgtagcatatcgaagataatttttatactgcatttttatggattattttgtaatgtgtgattccgtctgctgaggaggtgggaggggctccagggaaagccacccaccttcagtgaggttgctccccagctgagcgcaccgggcatgggatgtggaggctggcgacacaccctgtgcctctccaaggctgggcgcgtggggcgtccagagtctctctgggtctcagatgtccatctgccacctcttgttaaggctctagccagaagggagggtgagggtagaagaaagttattcccgaagaaaaaaagaatgaaaagtcattgtactgaactgtttttatatttttaaaagttactatttaaaggttaaaaaaaaaaaaaaaaaaaaaaa

SEQ ID NO: 2113 - DNA, 2671 bp, Homo sapiens; identical to SEQ ID NO: 1794

SEQ ID NO: 2114 - DNA, 1171 bp, Homo sapiens
ggggtctgtggcggcgcagcttacaccgcggtccccttatttggatctgcgggaatgtgggctggagaggtcctgccgtggtaccagcctccagcctgcccccaggactgcccctgacccaggcgcgcccgctgctcggtggcaggagggccggcggagcgccatggcctgcatcctgaagagaaagtctgtgattgctgtgagcttcatagcagcgttccttttcctgctggttgtgcgtcttgtaaatgaagtgaatttcccattgctactaaactgctttggacaacctggtacaaagtggataccattctcctacacatacaggcggccccttcgaactcactatggatacataaatgtgaagacacaagagcctttgcaactggactgtgacctttgtgccatagtgtcaaactcaggtcagatggttggccagaaggtgggaaatgagatagatcgatcctcctgcatttggagaatgaacaatgcccccaccaaaggttatgaagaagatgtcggccgcatgaccatgattcgagttgtgtcccataccagcgttcctcttttgctaaaaaaccctgattattttttcaaggaagcgaatactactatttatgttatttggggacctttccgcaatatgaggaaagatggcaatggcatcgtttacaacatgttgaaaaagacagttggtatctatccgaatgcccaaatatacgtgaccacagagaagcgcatgagttactgtgatggagtttttaagaaggaaactgggaaggacagtacagagtgaccatgcagtgttgattgatcgaacagcaaccaccacatacatgtcctgccccaccacaaaaggaaggaaggaataaaagaaagaaagaaagaaacaaacaaacaaacaaacaaaactaagcaagacaaaacaaatacccatgtcagtggttcaaagattaagattgtggctttgtgtaaagttctttccctttgtagacttgctgcataattattcaggtatgatggttacagtttttaaaaaggaagggaaattgtggtatgtggtatgtaaatatttttaaatgttgtctctctgttttgatcagtttttgttttattcaatttgtctttattaaatcttatcaaagcaaaaaaaaaaaaaaaaaaaaaaaaa

SEQ ID NO: 2115 - DNA, 6915 bp, Homo sapiens; identical to SEQ ID NO: 1079

SEQ ID NO: 2116 - DNA, 1992 bp, Homo sapiens
cgcgcgccggagcgcgctagccgcattgcgagccgaacccgggagctggcgccatggtgctgttgcacgtgctgtttgagcacgcggtcggctacgcgctgctggcgctgaaggaagtggaggagatcagtctgctgcagccgcaggtggaggagtctgtgctcaacctgggcaaattccacagcatcgttcgtctggtggccttttgtccctttgcctcatcccaggttgccttggaaaatgccaacgccgtgtctgaaggggttgttcatgaggacctccgcctgctcttggagacccacctgccgtccaaaaagaagaaagtactcttgggagttggggatcccaagattggtgccgcaatacaggaggagttagggtacaactgccagactggaggagtcatagctgagatcctgcgaggagttcgtctgcacttccacaatctggtgaagggtctgaccgatctgtcagcttgtaaagcacagctggggctgggacacagctattcccgtgccaaagttaagtttaatgtgaaccgggtggacaatatgatcatccagtccattagcctcctggaccagctggataaggacatcaataccttctctatgcgtgtcagggagtggtacgggtatcactttccggagctggtgaagatcatcaacgacaatgccacatactgccgtcttgcccagtttattggaaaccgaagggaactgaatgaggacaagctggagaagctggaggagctgacaatggatggggccaaggctaaggctattctggatgcctcacggtcctccatgggcatggacatatctgccattgacttgataaacatcgagagcttctccagtcgtgtggtgtctttatctgaataccgccagagcctacacacttacctgcgctccaagatgagccaagtagcccccagcctgtcagccctaattggggaagcggtaggtgcacgtctcatcgcacatgctggcagcctcaccaacctggccaagtatccagcatccacagtgcagatccttggggctgaaaaggccctgttcagagccctgaagacaaggggtaacactccaaaatatggactcattttccactccaccttcattggccgagcagctgccaagaacaaaggccgcatctcccgatacctggcaaacaaatgcagtattgcctcacgaatcgattgcttctctgaggtgcccacgagtgtattcggggagaagcttcgagaacaagttgaagagcgactgtccttctatgagactggagagataccacgaaagaatctggatgtcatgaaggaagcaatggttcaggcagaggaagcggctgctgagattactaggaagctggagaaacaggagaagaaacgcttaaagaaggaaaagaaacggctggctgcacttgccctcgcgtcttcagaaaacagcagtagtactccagaggagtgtgaggagatgagtgaaaaacccaaaaagaagaaaaagcaaaagccccaggaggttcctcaggagaatggaatggaagacccatctatctctttctccaaacccaagaaaaagaaatctttttccaaggaggagttgatgagtagcgatcttgaagagaccgctggcagcaccagtattcccaagaggaagaagtctacacccaaggaggaaacagttaatgaccctgaggaggcaggccacagaagtggctccaagaaaaagaggaaattctccaaagaggagccggtcagcagtgggcctgaagaggcggttggcaagagcagctccaagaagaagaaaaagttccataaagcatcccaggaagattagaatgcaaatggacattctctgggaggtggggcataccatagcccaaggtgacatttcccaccctgtgccgtgttccccaataaaaacaaattcacaagaaaaaaaaaaaaaaaaaaaaaaaaaaaaaaaaaaaaaaaaaaaaaaaaaaaaaaaa

SEQ ID NO: 2117 - DNA, 7603 bp, Homo sapiens
ttttcttgcttttcttcccttttttttctttttgcaaacaaaacaaaaaacagcatagaagaaagagcaaaataaagaagaagaagaggaggaagagagggaaagagaggaagggaaaaaaaacaccaacccgggcagaggaggaggtgcggcggcggcggcggcggcggcagcggcggcagcggcgcggcggcggctcggaccccctcccccggctccccccatcagtgcagctctccgggcgatgccagaatagatgccggggcaatgtcccgccgcaaacagggcaacccgcagcacttgtcccagagggagctcatcaccccagaggctgaccatgtggaggccgccatcctcgaagaagacgagggtctggagatagaggagccaagtggcctggggctgatggtgggtggccccgaccctgacctgctcacctgtggccagtgtcaaatgaacttccccttgggggacatcctggtttttatagagcacaaaaggaagcagtgtggcggcagcttgggtgcctgctatgacaaggccctggacaaggacagcccgccaccctcctcacgctccgagctcaggaaagtgtccgagccggtggagatcgggatccaagtcacccccgacgaagatgaccacctgctctcacccacgaaaggcatctgtcccaagcaggagaacattgcaggtaaagatgagccttccagctacatttgcacaacatgcaagcagcccttcaacagcgcgtggttcctgctgcagcacgcgcagaacacgcacggcttccgcatctacctggagcccgggccggccagcagctcgctcacgccgcggctcaccatcccgccgccgctcgggccggaggccgtggcgcagtccccgctcatgaatttcctgggcgacagcaaccccttcaacctgctgcgcatgacgggccccatcctgcgggaccacccgggcttcggcgagggccgcctgccgggcacgccgcctctcttcagtcccccgccgcgccaccacctggacccgcaccgcctcagtgccgaggagatggggctcgtcgcccagcaccccagtgccttcgaccgagtcatgcgcctgaaccccatggccatcgactcgcccgccatggacttctcgcggcggctccgcgagctggcgggcaacagctccacgccgccgcccgtgtccccgggccgcggcaaccctatgcaccggctcctgaaccccttccagcccagccccaagtccccgttcctgagcacgccgccgctgccgcccatgccccctggcggcacgccgcccccgcagccgccagccaagagcaagtcgtgcgagttctgcggcaagaccttcaagttccagagcaatctcatcgtgcaccggcgcagtcacacgggcgagaagccctacaagtgccagctgtgcgaccacgcgtgctcgcaggccagcaagctcaagcgccacatgaagacgcacatgcacaaggccggctcgctggccggccgctccgacgacgggctctcggccgccagctcccccgagcccggcaccagcgagctggcgggcgagggcctcaaggcggccgacggtgacttccgccaccacgagagcgacccgtcgctgggccacgagccggaggaggaggacgaggaggaggaggaggaggaggaggagctgctactggagaacgagagccggcccgagtcgagcttcagcatggactcggagctgagccgcaaccgcgagaacggcggtggtggggtgcccggggtcccgggcgcggggggcggcgcggccaaggcgctggctgacgagaaggcgctggtgctgggcaaggtcatggagaacgtgggcctaggcgcactgccgcagtacggcgagctcctggccgacaagcagaagcgcggcgccttcctgaagcgtgcggcgggcggcggggacgcgggcgacgacgacgacgcgggcggctgcggggacgcgggcgcgggcggcgcggtcaacgggcgcgggggcggcttcgcgccaggcaccgagcccttccccgggctcttcccgcgcaagcccgcgccgctgcccagccccgggctcaacagcgccgccaagcgcatcaaggtggagaaggacctggagctgccgcccgccgcgctcatcccgtccgagaacgtgtactcgcagtggctggtgggctacgcggcgtcgcggcacttcatgaaggaccccttcctgggcttcacggacgcacgacagtcgcccttcgccacgtcgtccgagcactcgtccgagaacggcagcctgcgcttctccacgccgcccggggacctgctggacggcggcctctcgggccgcagcggcacggccagcggaggcagcaccccgcacctgggcggcccgggccccgggcggcccagctccaaggagggccgccgcagcgacacgtgcgagtactgcggcaaggtgttcaagaactgcagcaacttgacggtgcaccggcggagccacaccggcgagcggccttacaagtgcgagctgtgcaactacgcgtgcgcgcagagcagcaagctcacgcgccacatgaagacgcacgggcagatcggcaaggaggtgtaccgctgcgacatctgccagatgcccttcagcgtctacagcaccctggagaaacacatgaaaaagtggcacggcgagcacttgctgactaacgacgtcaaaatcgagcaggccgagaggagctaagcgcgcgggccccggcgccccgcacctgtacagtggaaccgttgccaaccgagagaatgctgacctgacttgcctccgtgtcaccgccaccccgcaccccgcgtgtccccggggcccaggggaggcggcactccaacctaacctgtgtctgcgaagtcctatggaaacccgagggttgattaaggcagtacaaattgtggagccttttaactgtgcaataatttctgtatttattgggttttgtaatttttttggcatgtgcaggtactttttattattattttttctgtttgaattcctttaagagattttgttgggtatccatcccttctttgttttttttttaacccggtagtagcctgagcaatgactcgcaagcaatgttagaggggaagcatatcttttaaattataatttggggggaggggtggtgctgcttttttgaaatttaagctaagcatgtgtaatttcttgtgaagaagccaacactcaaatgacttttaaagttgtttactttttcattccttccttttttttgtcctgaaataaaaagtggcatgcagttttttttttaattattttttaattttttttttggtttttgtttttggggtggggggtgtggatgtacagcggataacaatctttcaagtcgtagcactttgtttcagaactggaatggagatgtagcactcatgtcgtcccgagtcaagcggccttttctgtgttgatttcggctttcatattacataagggaaaccttgagtggtggtgctgggggaggcaccccacagactcagcgccgccagagatagggtttttggagggctcctctgggaaatggcccgacagcattctgaggttgtgcatgaccagcagatactatcctgttggtgtgccctggggtgccatggctgctattcgctgtagattaggctacataaaatgggctgagggtacctttttggggagatggggtggcctgcagtgacacagaaaggaagaaactagcggtgttcttttaggcgttttctggcttgacggcttctctctttttttaaatcacccccaccacataaatctcaaatcctatgttgctacaaggggtcatccatcatttcccaagcagacgaatgccctaattaattgaagttagtgttctctcatttaatgcacactgatgatattgtagggatgggtggggtggggatcttgcaaatttctattctcttttactgaaaaagcaggggatgagttccatcagaaggtgcccagcgctacttcccaggtttttattttttttttcctatctcattaggttggaaggtactaaatattgaactgttaagattagacatttgaattctgttgacccgcactttaaagcttttgtttgcatttaaattaaatggcttctaaacaagaaattgcagcatattcttctctttggcccagaggtgggttaaactgtaagggacagctgagattgagtgtcagtattgctaagcgtggcattcacaatactggcactataaagaacaaaataaaataataatttataggacagtttttctactgccattcaatttgatgtgagtgccttgaaaactgatcttcctatttgagtctcttgagacaaatgcaaaactttttttttgaaatgaaaagactttttaaaaaagtaaaacaagaaaagtacattctttagaaactaacaaagccacatttactttaagtaaaaaaaaaaaaaattctggttgaagatagaggatatgaaatgccataagacccaatcaaatgaagaaataaacccagcacaaccttggacatccattagctgaattatcctcagccccttttgtttttgggacaacgctgcttagatatggagtggaggtgatttactgctgaattaaaactcaagtgacacaagttacaagttgatatcgttgaatgaaaagcaaaacaaaaacaattcaggaacaacggctaattttttctaaagttaaatttagtgcactctgtcttaaaaatacgtttacagtattgggtacatacaagggtaaaaaaaaaattgtgtgtatgtgtgttggagcgatctttttttttcaaagtttgcttaataggttatacaaaaatgccacagtggccgcgtgtatattgttttcttttggtgacggggttttagtatatattatatatattaaaatttcttgattactgtaaaagtggaccagtatttgtaataatcgagaatgcctgggcattttacaaaacaagaaaaaaaatacccttttcttttccttgaaaatgttgcagtaaaatttaaatggtgggtctataaatttgttcttgttacagtaactgtaaagtcggagttttagtaaatttttttctgccttgggtgttgaatttttatttcaaaaaaaatgtatagaaacttgtatttggggattcaaaggggattgctacaccatgtagaaaaagtatgtagaaaaaaagtgcttaatattgttattgctttgcagaaaaaaaaaaaatcacatttctgacctgtacttatttttctcttcccgcctccctctggaatggatatattggttggttcatatgatgtaggcacttgctgtatttttactggagctcgtaattttttaactgtaagcttgtccttttaaagggatttaatgtacctttttgttagtgaatttggaaataaaaagaaaaaaaaaacaaaaacaaacaggctgccataatatatttttttaatttggcaggataaaatattgcaaaaaaaacacatttgtatgttaagtcctattgtacaggagaaaaagggttgtttgacaacctttgagaaaaagaaacaaaaggaagtagttaaatgctttggttcacaaatcatttagttgtatatattttttgtcggaattggcctacacagagaaccgttcgtgttgggcttctctctgaacgccccgaaccttgcatcaaggctccttggtgtggccacagcagaccagatgggaaattatttgtgttgagtggaaaaaaatcagtttttgtaaagatgtcagtaacattccacatcgtcctccctttctctaagaggccatctctaagatgtcagatgtagaggagagagagcgagagaacatcttccttctctaccatcactcctgtggcggtcaccaccaccacctctcccgcccttaccagcagaaagcaatgcaaactgagctgctttagtccttgagaaattgtgaaacaaacacaaatatcataaaaggagctggtgattcagctgggtccaggtgaagtgacctgctgttgagaccggtacaaattggatttcaggaaggagactccatcacagccaggacctttcgtgccatggagagtgttggcctcttgtctttcttccctgctttgctgctttgctctctgaaacctacattccgtcagtttccgaatgcgagggcctgggatgaatttggtgcctttccatatctcgttctctctccttcccctgcgtttcctctccatccttcatcctccattggtcctttttttttctttcattttttatttaatttcttttcttcctgtctgttcctcccctaatcctctattttatttttattttttgtaaagccaagtagctttaagataaagtggtggtcttttggatgagggaataatgcatttttaaataaaataccaatatcaggaagccattttttatttcaggaaatgtaagaaaccattatttcaggttatgaaagtataaccaagcatccttttgggcaattccttaccaaatgcagaagcttttctgttcgatgcactctttcctccttgccacttacctttgcaaagttaaaaaaaaggggggagggaatgggagagaaagctgagatttcagtttcctactgcagtttcctacctgcagatccaggggctgctgttgcctttggatgccccactgaggtcctagagtgcctccagggtggtcttcctgtagtcataacagctagccagtgctcaccagcttaccagattgccaggactaagccatcccaaagcacaagcattgtgtgtctctgtgactgcagagaagagagaattttgcttctgttttgtgtttaaaaaaccaacacggaagcagatgatcccgagagagaggcctctagcatgggtgacccagccgacctcaggccggtttccgcactgccacaactttgttcaaagttgcccccaattggaacctgccacttggcattagagggtctttcatggggagagaaggagactgaattactctaagcaaaatgtgaaaagtaaggaaatcagcctttcatcccggtcctaagtaaccgtcagccgaaggtctcgtggaacacaggcaaacccgtgattttggtgctccttgtaactcagccctgcaaagcaaagtcccattgatttaagttgtttgcatttgtactggcaaggcaaaatatttttattaccttttctattacttattgtatgagcttttgttgtttacttggaggttttgtcttttactacaagtttggaactatttattattgcttggtatttgtgctctgtttaagaaacaggcacttttttttattatggataaaatgttgagatgacaggaggtcatttcaatatggcttagtaaaatatttattgttcctttattctctgtacaagattttgggcctctttttttccttaatgtcacaatgttgagttcagcatgtgtctgccatttcatttgtacgcttgttcaaaaccaagtttgttctggtttcaagttataaaaataaattggacatttaacttgatctccaaa

SEQ ID NO: 2118 - DNA, 2219 bp, Homo sapiens
ctagaagaactcgaccagtgagcaggcgaggaaggggcgggagccggggtcccggtagcttctagtaggttccagaaggcggcgcgtgcggttgggaacgcggagcggacggattcgattcaacggggttccggaccgcgctgcgctatggagcaggtcaatgagctgaaggagaaaggcaacaaggccctgagcgtgggtaacatcgatgatgccttacagtgctactccgaagctattaagctggatccccacaaccacgtgctgtacagcaaccgttctgctgcctatgccaagaaaggagactaccagaaggcttatgaggatggctgcaagactgtcgacctaaagcctgactggggcaagggctattcacgaaaagcagcagctctagagttcttaaaccgctttgaagaagccaagcgaacctatgaggagggcttaaaacacgaggcaaataaccctcaactgaaagagggtttacagaatatggaggccaggttggcagagagaaaattcatgaaccctttcaacatgcctaatctgtatcagaagttggagagtgatcccaggacaaggacactactcagtgatcctacctaccgggagctgatagagcagctacgaaacaagccttctgacctgggcacgaaactacaagatccccggatcatgaccactctcagcgtcctccttggggtcgatctgggcagtatggatgaggaggaagagattgcaacacctccaccaccaccccctcccaaaaaggagaccaagccagagccaatggaagaagatcttccagagaataagaagcaggcactgaaagaaaaagagctggggaacgatgcctacaagaagaaagactttgacacagccttgaagcattacgacaaagccaaggagctggaccccactaacatgacttacattaccaatcaagcagcggtatactttgaaaagggcgactacaataagtgccgggagctttgtgagaaggccattgaagtggggagagaaaaccgagaagactatcgacagattgccaaagcatatgctcgaattggcaactcctacttcaaagaagaaaagtacaaggatgccatccatttctataacaagtctctggcagagcaccgaaccccagatgtgctcaagaaatgccagcaggcagagaaaatcctgaaggagcaagagcggctggcctacataaaccccgacctggctttggaggagaagaacaaaggcaacgagtgttttcagaaaggggactatccccaggccatgaagcattatacagaagccatcaaaaggaacccgaaagatgccaaattatacagcaatcgagctgcctgctacaccaaactcctggagttccagctggcactcaaggactgtgaggaatgtatccagctggagccgaccttcatcaagggttatacacggaaagccgctgcgctggaagcgatgaaggactacaccaaagccatggatgtgtaccagaaggcgctagacctggactccagctgtaaggaggcggcagacggctaccagcgctgtatgatggcgcagtacaaccggcacgacagccccgaagatgtgaagcgacgagccatggccgaccctgaggtgcagcagatcatgagtgacccagccatgcgccttatcctggaacagatgcagaaggacccccaggcactcagcgaacacttaaagaatcctgtaatagcacagaagatccagaagctgatggatgtgggtctgattgcaattcggtgatgacttgttcatccccccttcccttcgccctcatgtggaaagaggagctgggaccgcggcgagcagcacggagcggaagggagagcaggggagagaaggcctcatctctctatatttatacataaccccggggaagacacagagactcgtacctgcgctgtttgtgccgccgctgcctctgggccctcccagcacacgcatggtctcttcaccgctgccctcgagttccatgtctctttcccctgcccctagttgctgtctcggctgctctcccatagttggttttttttttatttggggcagtgggcatgttatggggaggggagggggttcttccagcctcaggtcccagctgtctcacgttgtttattctgcgtccccttctccaataaaacaagccagttgggcgtggttatatgttgaaaaaaaaaaaaaaaaaa

SEQ ID NO: 2119 - DNA, 1367 bp, Homo sapiens
aaacctggggaggaagacatagaaaagcaactgctctatcattggctgacaagatcctgacaacaacacaatgagagctgcactccttgcaagtctttactagtagctgttgcttctgttctctggaaattctttaaacctagaatcagacacaaaaactgaactctgggtccacaatcctcatttgtccttgaagtatgaggctggtggcaagagtaactgtgtttctgacctttggaactataattgatgctaagaccacccagcccccctccatggattgcgctgaaggaagagctgcaaacctgccttgtaatcactctaccatcagtggaaatgagtatgtgtattggtatcgacagattcactcccaggggccacagtatatcattcatggtctaaaaaacaatgaaaccaatgaaatggcctctctgatcatcacagaagacagaaagtccagcaccttgatcctgccccacgctacgctgagagacactgctgtgtactattgcatcgtcagagataataatgcaggcaacatgctcacctttggagggggaacaaggttaatggtcaaaccccatatccagaaccctgaccctgccgtgtaccagctgagagactctaaatccagtgacaagtctgtctgcctattcaccgattttgattctcaaacaaatgtgtcacaaagtaaggattctgatgtgtatatcacagacaaaactgtgctagacatgaggtctatggacttcaagagcaacagtgctgtggcctggagcaacaaatctgactttgcatgtgcaaacgccttcaacaacagcattattccagaagacaccttcttccccagcccagaaagttcctgtgatgtcaagctggtcgagaaaagctttgaaacagatacgaacctaaactttcaaaacctgtcagtgattgggttccgaatcctcctcctgaaagtggccgggtttaatctgctcatgacgctgcggctgtggtccagctgagatctgcaagattgtaagacagcctgtgctccctcgctccttcctctgcattgcccctcttctccctctccaaacagagggaactctcctgctccccagagactgcctccgccatcccacagatgatggatcttcagtgggttctcttgggctctaggtcctgcagaatgttgtgaggggtttatttttttttaatagtgttcataaagaaatacatagtattcttcttctcaagacgtggggggaaattatctcattatcgaggccctgctatgctgtgtatctgggcgtgttgtatgtcctgctgccgatgccttcattaaaatgatttggaagagcagaaaaaaaaaaaaaaaaaaa

SEQ ID NO: 2120 - DNA, 2885 bp, Homo sapiens
tttttttttttttttttctggccagtcacgtgaagcagtgggagtggaaaaggaacaaagaaatctgtaactggtggtgatcagttactgtaaacaccacttcacctagaccagcctgagtatttttctttcgggtttttttttttttttttttttgctagttgcaaaatgaacatatttattataaaaaagttgaaacatatttgttttttgaggcaggctctcgctctgtcacccaggctgaagtgcagcggcgtgatcatgctattgcagcctcatctcctgggctcaagcaatcctccaacctctcaacctcccaagtcgctgggacctgacctcaggtgcatgccaccatgcccagctaattctttttacttttagtagagacaacttctcaccatgttgcccctagactggtatgaactcctgggctcaagcagttctcccaccctggcctcccaaagtgttgggattacaggtgtgacccaccatgcctggctgaaacttatgttttcttttctcttctttttttttttttttttttgagacggagtttcgccatgttggccaggctggtcttgaacccctggcttcaggtgatccgcccgtcttggcctcccacagtgctgggattacaggcgcaagccaccacagccagccatggaaagcattctgctgcttgtggaagaattttccctgcgtaaagttgtcgagatgtttgaataagtggtagagagagaggtcaggtgaatgtggcagatgaggcaaaacttcatagcccaattcattcaatttttgaagcattggttgtgtgacacaggtgttgtcgtggagaattgggctatttctgttgaccagtgctggctgcaggcattgcagttttcagtgcatctcattcatttgctgagcatacttgtcatatgtaatggttttgccgggattcggaaagctgtagtggctcagactggcagcagaccacctttttttggtgcaagtttggctttgggaagtgttttggagctgcttctcagtccagccactgaggtggttgtcgctagtttttgtataaaatctacttttcatcggatgtcatgatccagttgagaaatggtttgttgttgcctagaataagagaagacacttcagaaagacagtttttaaaattttcgctcagctcatggggcacccatttactgagctttttcacctttccagtttgcttcaaatgccaaacaaccgtagaatggttgacgttgagttctttggcaacttctcgtgtagttgtaagaggatcagcatcaatgattgctctcaattggttgttgtcaacttccgatggccggccactatgctcctcatcttcaaggctcttgtttcctttgtaaaacttcttgaaccaccactgcactgtatgcttgttaacagttcctgggccaaatgcgttgttgatgttgtgaattgtctctgctgctttacaacccattttgaacttgaataagaaaatcacttgaatttgctttttgtataacataattttcatcgtctaaaataaatataaaacaccaagtaataagtcattaacaaaaaaagtgacaaatgcacattaaaatgatatattgcgtaactacattcagaagaaaacaagaacttaaccacatttatttaagaatgtattccagtatcaaacggcaaatttcaacaacgcaaaaactgcaattacatttgcaacaacctaataaaagctgttacatttacttgattttagtccttaagagaaacttctgagagttaaatcctgtaatagagtcctcacatgaaggtgagagcaaagttgattcacctaatgtacgtgtcataattttaagtgttatgtggctgagttgaaggatgaaggtacaggatgtcttcatgttgataaaaattcaatgtctaatttcctttcatgtatgtgtgctttcttctttgaagctatagattagcctgactctgtcataggttaaattttctgagcatcttgtgttttccctaaactcgagtgactcctctgctatttatgcttgatttgatggcagggcaccccggctctgccccagactggcataccaacagaggctttggtgaaggggtccatttcgagaatgcccattgaagacagcagtcctgagaaaggcagagaggaagctgcatccagaggccatgttatttatgaaggcaaaagtggacatatcttgtcatatgatagtaagtattgtatgtatgcaccaaagccagtattacaatatgtgctaaaaacataggcttgggttttcccgcatttctgctctctgggagtcagtttatctttgctgagcctatgttttctctcagtaaatggggttagtaatacttgtctcatgagaattttgtgaataacagcttagtcgataaaaagtaattaacaacgcagagctcatattaaatgtcccataggtggtagctaagattgtcgactgtggtcagtcagtttagcttaggtaaagagcctttgttgaactttaatggaatacttttattttgaagagattcatgttttatgaattaagaattagagggtagataggctgggcgcggtggttcacgcctatctactatctaatcccagtactttgggaggccaaggcaggtggatcgcctggggtcgggagttcaagaccggcctgaccaacatggagaaaccccatctctactagaaatacaaagttagccaggcatggtggtgcatgcctgtaatcccagctactcgggaggctgaagcaggagaatcgcttgaatccgggaggcggaggttgctgtgagccgagatcgcgccatttccagcctgggcaacaagagggaaactccgtctc

SEQ ID NO: 2121 - DNA, 3520 bp, Homo sapiens
gcgggggcggggccgcggcgcctataaagtcgccctccgcccggacgtaaacaaacctcgcctggctcccagctggtgctgaagctcgtcagttcaccatccgccctcggcttccgcggggcgctgggccgccagcctcggcaccgtcctttcctttctccctcgcgttaggtaagcccgcgccctcttctcccaggcgcgacgcggagcagaaaggggccgcccgtgcggtgccgctggagcgccaggaccgccctttgtagccccgcgtactccaggagtaagcgccccggagctgcaagtgcgcggtcaccccggggcgcgggcgcgagggggctttgggtgcagacaccgctgaagtggggggttcaattacggaaagggaggaaaaaaagacagggtcccattcatctcccccctagctggggattggggttctggaggtcgggaagggggcgatgagacggtccgaaaaaataccaggatagcgtttcctggcgtcgtctccgaatcccagctggcgccgctggcaggggtgcgcgctggacgtgggtgcagaagggactaggcaggtgacagcagggacatgtctcgggagatgcaggatgtagacctcgctgaggtgaagcctttggtggagaaaggggagaccatcaccggcctcctgcaagagtttgatgtccaggagcaggacatcgagactttacatggctctgttcacgtcacgctgtgtgggactcccaagggaaaccggcctgtcatcctcacctaccatgacatcggcatgaaccacaaaacctgctacaaccccctcttcaactacgaggacatgcaggagatcacccagcactttgccgtctgccacgtggacgcccctggccagcaggacggcgcagcctccttccccgcagggtacatgtacccctccatggatcagctggctgaaatgcttcctggagtccttcaacagtttgggctgaaaagcattattggcatgggaacaggagcaggcgcctacatcctaactcgatttgctctaaacaaccctgagatggtggagggccttgtccttatcaacgtgaacccttgtgcggaaggctggatggactgggccgcctccaagatctcaggatggacccaagctctgccggacatggtggtgtcccacctttttgggaaggaagaaatgcagagtaacgtggaagtggtccacacctaccgccagcacattgtgaatgacatgaaccccggcaacctgcacctgttcatcaatgcctacaacagccggcgcgacctggagattgagcgaccaatgccgggaacccacacagtcaccctgcagtgccctgctctgttggtggttggggacagctcgcctgcagtggatgccgtggtggagtgcaactcaaaattggacccaacaaagaccactctcctcaagatggcggactgtggcggcctcccgcagatctcccagccggccaagctcgctgaggccttcaagtacttcgtgcagggcatgggatacatgccctcggctagcatgacccgcctgatgcggtcccgcacagcctctggttccagcgtcacttctctggatggcacccgcagccgctcccacaccagcgagggcacccgaagccgctcccacaccagcgagggcacccgcagccgctcgcacaccagcgagggggcccacctggacatcacccccaactcgggtgctgctgggaacagcgccgggcccaagtccatggaggtctcctgctaggcggcctgcccagctgccgcccccggactctgatctctgtagtggccccctcctccccggccccttttcgccccctgcctgccatactgcgcctaactcggtattaatccaaagcttattttgtaagagtgagctctggtggagacaaatgaggtctattacgtgggtgccctctccaaaggcggggtggcggtggaccaaaggaaggaagcaagcatctccgcatcgcatcctcttccattaaccagtggccggttgccactctcctcccctccctcagagacaccaaactgccaaaaacaagacgcgtagcagcacacacttcacaaagccaagcctaggccgccctgagcatcctggttcaaacgggtgcctggtcagaaggccagccgcccacttcccgtttcctctttaactgaggagaagctgatccagtttccggaaacaaaatccttttctcatttggggaggggggtaatagtgacatgcaggcacctcttttaaacaggcaaaacaggaagggggaaaaggtgggattcatgtcgaggctagaggcatttggaacaacaaatctacgtagttaacttgaagaaaccgatttttaaagttggtgcatctagaaagctttgaatgcagaagcaaacaagcttgatttttctagcatcctcttaatgtgcagcaaaagcaggcgacaaaatctcctggctttacagacaaaaatatttcagcaaacgttgggcatcatggtttttgaaggctttagttctgctttctgcctctcctccacagccccaacctcccacccctgatacatgagccagtgattattcttgttcagggagaagatcatttagatttgttttgcattccttagaatggagggcaacattccacagctgccctggctgtgatgagtgtccttgcaggggccggagtaggagcactggggtgggggtggaattggggttactcgatgtaagggattccttgttgttgtgttgagatccagtgcagttgtgatttctgtggatcccagcttggttccaggaattttgtgtgattggcttaaatccagttttcaatcttcgacagctgggctggaacgtgaactcagtagctgaacctgtctgacccggtcacgttcttggatcctcagaactctttgctcttgtcggggtgggggtgggaactcacgtggggagcggtggctgagaaaatgtaaggattctggaatacatattccatgggactttccttccctctcctgcttcctcttttcctgctccctaacctttcgccgaatggggcagcaccactgacgtttctgggcggccagtgcggctgccaggttcctgtactactgccttgtacttttcattttggctcaccgtggattttctcataggaagtttggtcagagtgaattgaatattgtaagtcagccactgggacccgaggatttctgggaccccgcagttgggaggaggaagtagtccagccttccaggtggcgtgagaggcaatgactcgttacctgccgcccatcaccttggaggccttccctggccttgagtagaaaagtcggggatcggggcaagagaggctgagtacggatgggaaactattgtgcacaagtctttccagaggagtttcttaatgagatatttgtatttatttccagaccaataaatttgtaactttgcagcggaaaaaaaaaaaaaaaaaaaaaaaaaaaaaaaaaaaaaaaaaa

SEQ ID NO: 2122 - DNA, 2997 bp, Homo sapiens
agtgggcggggcctccttgaggaccccgggctgggcgccgccgccggttcgtctactctttccttcagccgcctcctttcaaccttgtcaacccgtcggcgcggcctctggtgcagcggcggcggctcctgttcctgccgcagctctctccctttcttacctccccaccagatcccggagatcgcccgccatggctttacttactgcggccgcccggctcttgggaaccaagaatgcatcttgtcttgttcttgcagcccggcatgccagtgcttcctccacgaatttgaaagacatattggctgacctgatacctaaggagcaggccagaattaagactttcaggcagcaacatggcaagacggtggtgggccaaatcactgtggacatgatgtatggtggcatgagaggcatgaagggattggtctatgaaacatcagttcttgatcctgatgagggcatccgtttccgaggctttagtatccctgaatgccagaaactgctacccaaggctaagggtggggaagaacccctgcctgagggcttattttggctgctggtaactggacatatcccaacagaggaacaggtatcttggctctcaaaagagtgggcaaagagggcagctctgccttcccatgtggtcaccatgctggacaactttcccaccaatctacaccccatgtctcagctcagtgcagctgttacagccctcaacagtgaaagtaactttgcccgagcatatgcacagggtatcagccgaaccaagtactgggagttgatttatgaagactctatggatctaatcgcaaagctaccttgtgttgcagcaaagatctaccgaaatctctacagagaaggcagcggtattggggccattgactctaacctggactggtctcacaatttcaccaacatgttaggctatactgatcatcagttcactgagctcacgcgcctgtacctcaccatccacagtgaccatgagggtggcaatgtaagtgcccataccagccatttggtgggcagtgccctttccgacccttacctgtcctttgcagcagccatgaacgggctggcagggcctctccatggactggcaaatcaggaagtgcttgtctggctaacacagctgcagaaggaagttggcaaagatgtgtcagatgagaagttacgagactacatctggaacacactcaactcaggacgggttgttccaggctatggccatgcagtactaaggaagactgatccgcgatatacctgtcagcgagagtttgctctgaaacacctgcctaatgaccccatgtttaagttggttgctcagctgtacaagattgtgcccaatgtcctcttagagcagggtaaagccaagaatccttggcccaatgtagatgctcacagtggggtgctgctccagtattatggcatgacggagatgaattactacacggtcctgtttggggtgtcacgagcattgggtgtactggcacagctcatctggagccgagccttaggcttccctctagaaaggcccaagtccatgagcacagagggtctgatgaagtttgtggactctaagtcagggtaaaactggagactgggtgaaagtgactaccagaaagtgaggaagcctaaataaaaagtatacttttgtttcagggggcctttaaagacttaagattaaattatatctgaggcactgataatatgtttgaggttaaaatataaattaagactttaaaagatgaaaaatggtcccttcttccctaatcagctcccttcccctgcctggtatgagttgcccatcatacgcatggtcctggaggatgaccaggactaatgcatgtggtatgagtaggtttggccccctcactatctctagagtgagaatctggctcctgtttccatgggtcaaagccggttgcagagaatctgtagtcactttggagctttagcttctctgccaagccctcaataagccagcaaaccaggactctgccccttctgtttccataggaatcatgttggatagtcagctgtaccaagccccttggccctctcccatgcacacaaacacctcctagcaagacctgttggttagctggacatgctttggcaatttttttatactaccaagtgaccataaaggcatggcatttgttgtgactggcacccaatgtttgattttttttttaaaactatccaattaaaattaaggtctgggagtgttctgtttcccattactttaatactcacctcctcccagactttctacacctgttgcacctcaggcagaggatgttctggacctccccctcttggtccctactagagacctctcaacagatctgtgggcccagtcattgggttttatcagtgcttaatgtgaactaagttttttacttccacagaatacaagccactaccttctgacctccccaccccccaccaacccccatcttttaatatgctgtggggcatagaactccggaatgaccagcatgatattttcagagtcttgtccccggggtattagcacctctttttgaacagggaattgattcaagattggacatggtctcctctgattatcaggtactggggctgagggcattaaaaatagtaagcctccctcctcgtcccctgcctcaagaaattgcctccttatttatcaacatctttttcctccctttccctgagagctcacagtacaatgtttcagaagccccatttgcacaggttttcagcaactcagaatgctctacttctttttctttgagaaaggattaagatacactcctgctgtgcccccatctttcctccaaactcctgcctgtgtttgtgtggatacccagtcccagaaccacactgttgagttggacacactgtaaacccctgggtaactgtcaagtcatgatggagacttcaggttgttctgtataaaatgcaaaataaatgtttttattaacaatgaaaaaaaaaaaaaaaaaaaaa

SEQ ID NO: 2123 - DNA, 6620 bp, Homo sapiens
gttaaacagctgcttttaatttggtccccccaatctcaggcgtttggggggctagtccgccggccgctcggtctggccggcccgacgtggtgtgggccctgcgggccctgggaccgagctgaggggaggctcggagttccgcggccgaggttttgtagtgcatccctgagcatgagcacagaatgaagcggcgtttggatgaccaggagtcaccggtgtatgcagcccagcagcgtcggatccctggcagcacagaggcttttcctcaccagcaccgggtgcttgcccctgcccctcctgtgtatgaagcagtgtctgagaccatgcagtcagctacgggaattcagtactctgtaacacccagctaccaggtttcagccatgccacagagctccggcagtcatgggcccgctatagcagcagttcatagcagccatcatcacccaacagcggtgcagccccacggaggccaggtggtccagagtcatgctcatccagccccaccagttgcaccagtgcagggacagcagcaatttcagaggctgaaggtggaggatgcgctatcttatcttgaccaggtgaagctgcagtttggtagtcagcctcaggtctacaatgatttccttgacatcatgaaggaatttaaatctcagagcatcgacaccccaggagtgattagtcgtgtgtcccagctattcaaaggccaccccgatctgataatgggattcaacaccttcttgccccctggctacaaaattgaggtgcaaaccaatgacatggtgaatgtgacaactcctggccaggttcatcagattcccacccatggcatccagccacagcctcaaccaccaccccaacatccttcccagccttcagcccagtcagccccagctcctgcccagccagctcctcagcccccacctgccaaagtcagcaagccctcccaactgcaagcacatactccggccagtcagcagactcccccacttccaccgtatgcatccccacgttctccgccggtccagcctcacacaccagtgacaatctcgttgggaacggccccatccttgcagaacaatcaacctgtggagtttaatcatgccatcaactatgttaataagatcaagaacagatttcagggccaaccagacatctacaaagcattcctggagattttgcacacatatcagaaagagcagagaaatgccaaggaagctggaggaaactacactccagcattgacagagcaggaggtgtatgcccaggttgctcgtctctttaaaaaccaggaagatttgttgtcagagtttggacaattcctaccagatgccaacagctccgtgcttttaagcaaaacaactgctgagaaggttgattctgtgagaaatgatcatggaggcactgtcaagaagccccaactgaacaacaagccgcagaggcccagccagaatggctgccagatccgcagacatcctacaggaaccacccctccagttaagaagaaacccaaactgctcaatctgaaggattcttctatggcagatgccagcaaacatggtggtggaacagaatcgttattttttgataaggtccgaaaggctcttcggagtgcagaagcctacgaaaatttcctacgctgtcttgttatttttaaccaggaggtgatctctcgtgctgagcttgtgcaactagtctctcctttcctggggaaattccctgagttgtttaattggtttaaaaactttctgggctataaggagtctgtacatctggaaacttatccaaaggagcgagccacagagggcattgctatggagatagattatgcttcttgtaaacgattgggctccagctatcgagccttaccaaagagttaccagcagcccaagtgtacaggacggactcctctctgtaaagaggttttaaatgatacctgggtttccttcccttcgtggtctgaggactctacctttgtgagttccaagaagactcaatatgaagaacatatttatcgttgtgaagatgaacgctttgagcttgatgtagttttagagaccaatctggcaacaatccgggttctggaagcaatacagaagaagctttcccgcttgtctgctgaagaacaagccaaatttcgcttggacaacacccttgggggcacatcagaagtcatccatagaaaagcactccagaggatatatgctgataaagcagctgacatcattgatggtctgagaaagaatccctccattgctgttccaattgtccttaaaaggttgaagatgaaagaggaagaatggcgagaagctcagagaggctttaacaaagtatggcgagaacaaaatgagaaatactacttgaagtctctggaccaccaggggatcaactttaaacagaatgacaccaaggtcctgaggtctaagagcttactcaatgagattgagagtatctatgatgagaggcaagagcaggctacggaggagaatgctggtgtacctgttggcccacacctctcacttgcgtatgaagacaaacaaatactggaagatgctgctgctctgattatccaccatgtgaagaggcagacaggcattcagaaggaggacaaatataagataaaacaaatcatgcatcattttattccagatttgctctttgcccaaagaggtgatctctcagatgtggaggaagaggaagaagaagagatggatgtagatgaagccacaggggcagttaagaagcacaatggtgttgggggcagtccccctaagtccaagttactgtttagtaacacagcagctcaaaaattaagaggaatggatgaagtatacaacctcttctatgtcaacaacaactggtatatttttatgcgactgcaccagattctctgcctgaggctgctacggatttgttcccaagccgaacggcaaattgaagaagaaaaccgagagagagaatgggaacgggaagtgctgggcataaagcgagacaagagtgacagccctgccattcagctacgtctcaaagaacctatggatgttgatgtagaagattattacccagctttcctggacatggtgcggagcctgctggatggcaacatagactcatcacagtatgaagattcactgagagagatgttcaccattcatgcctacattgcctttaccatggacaaactgatccagagcattgtcagacagctgcagcatatcgtgagtgatgagatctgtgtgcaggtgactgacctttacctggcagaaaataataatggggccaccggaggccagctgaacacacagaactcaaggagcctcctggagtcaacgtatcagcggaaagctgagcagctaatgtcagatgagaattgctttaagcttatgtttattcagagccaaggccaggtccagctgactattgagcttctggacacagaagaggagaattcggatgaccctgtggaagcagagcgctggtcagactacgtggagcgatacatgaattcagatactacctcgcctgagcttcgtgaacatctagcacagaaaccagtatttctccccaggaatctacggcggatccggaagtgtcaacgtggtcgagagcagcaggaaaaggaagggaaggaaggaaacagcaagaagaccatggagaatgtggatagtctggataagctggagtgtagattcaagctgaattcctacaagatggtgtatgtgatcaaatcagaggactatatgtatcggaggaccgccctgctccgggctcatcagtcccatgagcgtgtaagcaagcgtctacatcagagattccaggcctgggtagataaatggaccaaggagcatgtgccccgtgaaatggcagcagagaccagcaagtggctcatgggtgaggggctggagggcctggtgccctgtaccaccacctgtgatacagagaccctgcattttgtgagcattaacaagtatcgtgtcaaatacggcacagtattcaaagccccttaactgcaaagccagagcagataacttggggtgtgtgtggggatgtgtgtgtgggcctatgcactcacacactgaagaaacaaggaagatgcctttcaagcctcactgggcctctctgggacatggccacctgacctgtgtgtggctggtgcagcctggcaccaagtgggctacctgttaggaacatgaataccttacaaagctgaagctggaacttttcccaaagggttttgggtatagcctgccctggaggggaaggaagtccatgcaagcaaagacatgcagtttgcttgcacacaccagcagagctaagactggagtctcctgtggcctaactttcaatgagggaaccggatgctgttcacactttgactggatggagatgcatttacaaaacagactggagaaggacttaatactcagatggattggaactatcatggtcactgctcctctcccctccccacaaaaggaaaaaaaagctggatttgattttttttttctggtcactcgagcacatctaagatcacccattaggttttatctgggacctgcagtttggctttgggattgatcatcttgtggattttattcctgacgattcccttgctgcctacccttttctctcctctggttctcaacctcaacgagttcaaatcagttgtcctttttagctcccgtggaactgttttgtatctgcctctttactagtctaccttagtgccatccaccagctttactctctgacacacacacgcacacacacacacaattttaacttgtttttttgtacataatgtacatactgtcaattttttattaaaagaaatatgctttgatgtgctagcataactgctctagcttcttgtgtaccatagtactgtggcttcagatttagtacctatgaacagatgtacaagacatttattacactttttaccaaagggagttaccattgtagtacttttgtgtaaaacttgtcttcccctttgcccccaacttttttttttttttttttgtaaataaataaagcttggttcttacttaaggaataaactctcaacccacgtcccttgtcctcaccagaaaatactgtgaagcagggattttgacttcagttccttatccagggtagaaacaggattttgcttaaaatacttgttacttgtcccaaatcaaaatattccaaaatcttagaatacttaagtcttttagtacgtgtttttttcccttgttcaaataatctgaaaatattttatatttgggtaagttgtcaagctatgtagtttgtatttctatatattttttcttattcacattggtgatggatgggggtgagcaacttaaataccaaaccagtgtttgaaaaaaaagtgtgcataaggcatgtggtataccttataaatggagttgggagggagagaatttgaaatgggatacctatttttttaattacataaatttaaactagcagacatttaaacatgaatgattaggatttttctatgtggttaacctggactttctgaacaaagaccaactgagcccctcccagtactctggtggatttttcttcagcaaccattacgcaagtcttagttgtaaccagcaatgttctgtgtgttttatgtttgctttttagttaaaaatcaccaccaccaccaaaaagaaaaacaaaattttttggctcctggattttcaaaacacatggtagacctctctgattttaggcttttattgtttaaagacagtgtctcgctttatgacccacactggagtgcagtgccacgatcatagctcactgcaggcttgacctcccaggctcaagcagtcctcccacctcggcctcctgagtagctgcatgccaccacgcccagctaattttttaactttttgtagagacagggtcttgctatgctgcccaggttggtctcaaactcctggcctcaagctgtcctcccacctcggcctcgcaaagtgctgagattacaggtgtgagccaccctggcctgattttaggctttttttgtactggggagaagagactgtgagccaaagtgtagggtgccaaaaagagctttgtgggatgagattttagggcaaagctggggcagtgtctgacttggcggtggtcatgtgtactgatttaggggaaagatcttgaggttttctcaaataattcacctatccccgtgttccctcaagaaaggtcatgttgacctggaaccataggggaaattggtggggtgtgatcagggtcagccccagctgttgctgcccctgcagtgttttgtccagagcacttgcctgcaggtcaggataggatttcaaggccagttcaggagaaagtcccaacccaccagtgcaaccaacaaaagagtaagttttacctacagcctgggttttcacaagtagcatttttattcctcctgctgtctgacatctgagctccaagctctaaacccaacctgtattatatgcagcagcaggttatctttgttttaaatcacatttgttattctgtacttagtcacctttccgtgtgatctgcatttgaaatgttgtaaacttggtcagtatttccattaaaatatcagggctaaaaaaaaaaaaaaaaaa

SEQ ID NO: 2124 - DNA, 1496 bp, Homo sapiens
gccgcccgggggcttttgccagcggcgccgcgggcctgcgtgctggggcagcgggcacttcttcgacctcgtcctcctcgtcctgtgcggccggccgggtgaggccgggcccgcgtagggggcagtcggcggctgcctccggcggaggtgcctcgcggcgcccgggccggcccgcgcctcggcggcgtgctccatgcatccggagcccgccccgcccccgagccgcagcagtcccgagcttcccccaagcggcggcagcaccaccagcggcagccgccggagccgccgccgcagcggggacggggagcccccgggggccccgccaccgccgccgtccgccgtcacctacccggactggatcggccagagttactccgaggtgatgagcctcaacgagcactccatgcaggcgctgtcctggcgcaagctctacttgagccgcgccaagcttaaagcctccagccggacctcggctctgctctccggcttcgccatggtggcaatggtggaggtgcagctggacgctgaccacgactacccaccggggctgctcatcgccttcagtgcctgcaccacagtgctggtggctgtgcacctgtttgcgctcatgatcagcacctgcatcctgcccaacatcgaggcggtgagcaacgtgcacaatctcaactcggtcaaggagtccccccatgagcgcatgcaccgccacatcgagctggcctgggccttctccaccgtcatcggcacgctgctcttcctagctgaggtggtgctgctctgctgggtcaagttcttgcccctcaagaagcagccaggccagccaaggcccaccagcaagccccccgccagtggcgcagcagccaacgtcagcaccagcggcatcaccccgggccaggcagctgccatcgcctcgaccaccatcatggtgcccttcggcctgatctttatcgtcttcgccgtccacttctaccgctcactggttagccataagactgaccgacagttccaggagctcaacgagctggcggagtttgcccgcttacaggaccagctggaccacagaggggaccaccccctgacgcccggcagccactatgcctaggcccatgtggtctgggcccttccagtgctttggccttacgcccttccccttgaccttgtcctgccccagcctcacggacagcctgcgcagggggctgggcttcagcaaggggcagagcatggagggaagaggatttttataagagaaatttctgcactttgaaactgtcctctaagagaataagcatttcctgttcttccagctccaggtccacctcctgttgggaggcggtggggggccaaagtggggccacacactcgctgtgtcccctctcctcccctgtgccagtgccacctgggtgcctcctcctgtcctgtccgtctcaacctccctcccgtccagcattgagtgtgtacatgtgtgtgtgacacataaatatactcataaggacacctcc

SEQ ID NO: 2125 - DNA, 3222 bp, Homo sapiens; identical to SEQ ID NO: 1741

SEQ ID NO: 2126 - DNA, 5777 bp, Homo sapiens; identical to SEQ ID NO: 910

SEQ ID NO: 2127 - DNA, 1397 bp, Homo sapiens; identical to SEQ ID NO: 2050

SEQ ID NO: 2128 - DNA, 6453 bp, Homo sapiens
cggcagggcgcgagagcgcacccgcggcggcggtggcggcgactgtgggggggcggcggggaacattggctaagccgacagtggaggcttaggcaccggtggcgggcggctgcggttcctggtgctgctcggcgcgcggccagctttcggaacggaacgctcggcgtcgcgggccccgcccggaaagtttgccgtggagtcgcgacctcttggcccgcgcggcccggcatgaagcggcgttgaggagctgctgccgccgcttgccgctgccgccgccgccgcctgaggaggagctgcagcaccctgggccacgccgatgactactgcaaactgtggcgcccacgacgagctcgacttcaaactcgtctttggcgaggacggggcgccggcgccgccgcccccgggctcgcggcctgcagatcttgagccagatgattgtgcatccatttacatctttaatgtagatccacctccatctactttaaccacaccactttgcttaccacatcatggattaccgtctcactcttctgttttgtcaccatcgtttcagctccaaagtcacaaaaactatgaaggaacttgtgagattcctgaatctaaatatagcccattaggtggtcccaaaccctttgagtgcccaagtattcaaattacatctatctctcctaactgtcatcaagaattagatgcacatgaagatgacctacagataaatgacccagaacgggaatttttggaaaggccttctagagatcatctctatcttcctcttgagccatcctaccgggagtcttctcttagtcctagtcctgccagcagcatctcttctaggagttggttctctgatgcatcttcttgtgaatcgctttcacatatttatgatgatgtggactcagagttgaatgaagctgcagcccgatttacccttggatcccctctgacttctcctggtggctctccagggggctgccctggagaagaaacttggcatcaacagtatggacttggacactcattatcacccaggcaatctccttgccactctcctagatccagtgtcactgatgagaattggctgagccccaggccagcctcaggaccctcatcaaggcccacatccccctgtgggaaacggaggcactccagtgctgaagtttgttatgctgggtccctttcaccccatcactcacctgttccttcacctggtcactcccccaggggaagtgtgacagaagatacgtggctcaatgcttctgtccatggtgggtcaggccttggccctgcagtttttccatttcagtactgtgtagagactgacatccctctcaaaacaaggaaaacttctgaagatcaagctgccatactaccaggaaaattagagctgtgttcagatgaccaagggagtttatcaccagcccgggagacttcaatagatgatggccttggatctcagtatcctttaaagaaagattcatgtggtgatcagtttctttcagttccttcaccctttacctggagcaaaccaaagcctggccacacccctatatttcgcacatcttcattacctccactagactggcctttaccagctcattttggacaatgtgaactgaaaatagaagtgcaacctaaaactcatcatcgagcccattatgaaactgaaggtagccgaggggcagtaaaagcatctactgggggacatcctgttgtgaagctcctgggctataacgaaaagccaataaatctacaaatgtttattgggacagcagatgatcgatatttacgacctcatgcattttaccaggtgcatcgaatcactgggaagacagtcgctactgcaagccaagagataataattgccagtacaaaagttctggaaattccacttcttcctgaaaataatatgtcagccagtattgattgtgcaggtattttgaaactccgcaattcagatatagaacttcgaaaaggagaaactgatattggcagaaagaatactagagtacgacttgtgtttcgtgtacacatcccacagcccagtggaaaagtcctttctctgcagatagcctctatacccgttgagtgctcccagcggtctgctcaagaacttcctcatattgagaagtacagtatcaacagttgttctgtaaatggaggtcatgaaatggttgtgactggatctaattttcttccagaatccaaaatcatttttcttgaaaaaggacaagatggacgacctcagtgggaggtagaagggaagataatcagggaaaaatgtcaaggggctcacattgtccttgaagttcctccatatcataacccagcagttacagctgcagtgcaggtgcacttttatctttgcaatggcaagaggaaaaaaagccagtctcaacgttttacttatacaccagttttgatgaagcaagaacacagagaagagattgatttgtcttcagttccatctttgcctgtgcctcatcctgctcagacccagaggccttcctctgattcagggtgttcacatgacagtgtactgtcaggacagagaagtttgatttgctccatcccacaaacatatgcatccatggtgacctcatcccatctgccacagttgcagtgtagagatgagagtgttagtaaagaacagcatatgattccttctccaattgtacaccagccttttcaagtcacaccaacacctcctgtggggtcttcctatcagcctatgcaaactaatgttgtgtacaatggaccaacttgtcttcctattaatgctgcctctagtcaagaatttgattcagttttgtttcagcaggatgcaactctttctggtttagtgaatcttggctgtcaaccactgtcatccataccatttcattcttcaaattcaggctcaacaggacatctcttagcccatacacctcattctgtgcataccctgcctcatctgcaatcaatgggatatcattgttcaaatacaggacaaagatctctttcttctccagtggctgaccagattacaggtcagccttcgtctcagttacaacctattacatatggtccttcacattcagggtctgctacaacagcttccccagcagcttctcatcccttggctagttcaccgctttctgggccaccatctcctcagcttcagcctatgccttaccaatctcctagctcaggaactgcctcatcaccgtctccagccaccagaatgcattctggacagcactcaactcaagcacaaagtacgggccaggggggtctttctgcaccttcatccttaatatgtcacagtttgtgtgatccagcgtcatttccacctgatggggcaactgtgagcattaaacctgaaccagaagatcgagagcctaactttgcaaccattggtctgcaggacatcactttagatgatgaccaatttatatctgacttggaacaccagccatcaggttcagcagagaaatggcctaaccacagtgtgctctcatgtccagctcctttctggagaatctagaggtgaacgagataattgggagagacatgtcccagatttctgtttcccaaggagcaggggtgagcaggcaggctcccctcccgagtcctgagtccctggatttaggaagatctgatgggctctaacagtgcttactgcagccttgtgtccaccaccaacttctcagcatgtttctctccttggaccttgggtttccaactctgcagccttcaggtctggggccaggagtgggacccaccatttgtggggaaagtagcattcctccacctcaggccttgggtagatttggcaaaagaacaggagcagcataggctgtttgagctttggggaaatgaactttgctttttatatttaactaggatacttttatatgatgggtgctttgagtgtgaatgcagcaggctctcttgtttccgaggtgctgcttttgcaggtgacctggttacttagctaggattggtgatttgtactgctttatggtcatttgaagggccctttagtttttatgataatttttaaaataggaacttttgataagaccttctagaagcaaaaaaaaaaaaaaaaaaaaaaaaaagaaaaaaaaagaaaagaaaaaaagaaaaagaaaaaaatatcccaagcccacacctatgcctcagaaagtcagcatgtgtcctgaagacgttcatagatttataggaaataaagccaaatgtagctcatacctctttataaaactaaactgttgttagataaaatgagaagagaccattccatcattgaagtgttggaatataaaaagacattccagagcatagccttttggtaactttctaggtaatcttgcaatctctccatactggctccatgttgaaattgctttttccctcaggaccctgggtaagatggctacatttaaggtgactctgaatggtggggttctagcttggtcactttcatttcttgccatcataaaaactagtaggctgtggagtgcgcttcctgtttgtgtcatctggtcgtagaaccttttccaaacagaagcatctgcctttggctgttctgtgacctttgaagccagtctcagtggtttaggcagctttgcagttctaactctagctagaggccaggctgtgtgcagagctaaagcacaaatgagcagtacatcagcatgggcagagaaaatacaggactccagatgggaaggttttaagagtcacactggcatggaaggcttatctgccattctatttatagcctgaaatgattctggcctaccctgtcctgtctgtatgatctaaaaaccagccttttccccagaaggctctgagcacatccagaagtgataacctgaccctccacaccaaagacaccctggtgctgctgctggtgagactggtgtccaaggcagggcccagcagaaactgcagcctgctgtctaccaaaggaggtacccgagttgggtactttaaaaaaaaaaaaaacctgcccttacccctctccctaatgggattttttttacctgttcctgggcccattacagagcctctgaagtttgcagtatgctttcaaatgaaataatatacttccattgattcaggaagcagattttttgagtgcctatatgtgagacagtgtgctggttgaaggcctgatgctgttattccaggagactgcaggcccttgatgccaggactctctctactaaggccagttcaggtctgggaaagggagctggcctattgcccaccacctgttgtcagtaggttaggagctgttgactcaggatgaggaagtatggtctttaaaaaaaacaaaatatattttagatttctcccctaaagttagttagagaaaaaggtctattcttcagcagatcactgtggcccctcttggagctgggtgttttcaaattttcttgaaaagtgagttgtgtcacagaatgtggatagtgagatttgcttctgggcctgtggttggacgcccacagcttcctttggaggggcaagaagttggcctctcggttgacattccagagaaatggccagacttgcccctacccttttgcccctggtgtagctgcctcacatgaggttattgcaagagttccccttgcaataccctttgtgccctcaagaattaaaagcctctatgatccagagttgctatgcaccaaattttgatgccttctaaataccttgatgcctgtagcactagaaatgctttcctatttaaaataaacattaaattttaaaatagagctttgtatactatgtaagcagttttatatcagctttgtaaaagctttggtgttaagagtcaatattttttggctttgtagataaagacttaaatttttgtgcaacatagtggtgttaaagcacacatccattggactatgcaaatcaatttctactagcagcactgagcaactgggcacgtgctagtacgcaccccctcctactctaactgtgctagctcttgggttgaggaatggaatgggtagccttctgcttactggagatgcacagagaaacatggctgaaaacagctttaaaaagaacatgtctttgggttcatgtgtggtgctgctgcccgggtgtaaactatccccacccagggccagccattatcaccagacctcttctgggcctggctgtgaagccctgtttttggtattcagaatggatctttaaggctcagatgggctcaaattgaaaccttgtgttttataaaatggatgtttagtaaaggaactggttctcagttatgtttacagcacttggaattgtgtgttcttgtacattttgtattttaaaaccttttatgggagtgcagtgctccttacacaaatacaaagggaagaagagccagcagttgaggctcctcagttttagtgctgaaataataaacagtgacaggtcaacagtaaaaaaaaaaaaaaaaaa

SEQ ID NO: 2129 - DNA, 4295 bp, Homo sapiens
gaggaggttcctgtagggcggcacaaccagggagggcgtggaagctctgcatcccttctcccataccttgctctacacatctcttcatctgtatcctctgcagcatccttgatgataaaccagtaaatatgagttttgatcatcctgagaaaaatgggccttggcctgcagacccaataaaccttccctcccatggataatagtgctaattcctgaggacctgaagggcctgccgcccctgggggattagccagaagcaggcttgttttcctgctcagaacaaagtgacttccctgaacacatcttcattatgattcacaccaacctgaagaaaaagttcagctgctgcgtcctggtctttcttctgtttgcagtcatctgtgtgtggaaggaaaagaagaaagggagttactatgattcctttaaattgcaaaccaaggaattccaggtgttaaagagtctggggaaattggccatggggtctgattcccagtctgtatcctcaagcagcacccaggacccccacaggggccgccagaccctcggcagtctcagaggcctagccaaggccaaaccagaggcctccttccaggtgtggaacaaggacagctcttccaaaaaccttatccctaggctgcaaaagatctggaagaattacctaagcatgaacaagtacaaagtgtcctacaaggggccaggaccaggcatcaagttcagtgcagaggccctgcgctgccacctccgggaccatgtgaatgtatccatggtagaggtcacagattttcccttcaatacctctgaatgggagggttatctgcccaaggagagcattaggaccaaggctgggccttggggcaggtgtgctgttgtgtcgtcagcgggatctctgaagtcctcccaactaggcagagaaatcgatgatcatgacgcagtcctgaggtttaatggggcacccacagccaacttccaacaagatgtgggcacaaaaactaccattcgcctgatgaactctcagttggttaccacagagaagcgcttcctcaaagacagtttgtacaatgaaggaatcctaattgtatgggacccatctgtataccactcagatatcccaaagtggtaccagaatccggattataatttctttaacaactacaagacttatcgtaagctgcaccccaatcagcccttttacatcctcaagccccagatgccttgggagctatgggacattcttcaagaaatctccccagaagagattcagccaaaccccccatcctctgggatgcttggtatcatcatcatgatgacgctgtgtgaccaggtggatatttatgagttcctcccatccaagcgcaagactgacgtgtgctactactaccagaagttcttcgatagtgcctgcacgatgggtgcctaccacccgctgctctatgagaagaatttggtgaagcatctcaaccagggcacagatgaggacatctacctgcttggaaaagccacactgcctggcttccggaccattcactgctaagcacaggctcctcactcttctccatcaggcattaaatgaatggtctcttggccaccccagcctgggaagaacattttcctgaacaattccagcctgctccttttactctaggggcctctgtcagcaagaccatggggacttcaagagcctgtggtcaggaaatcaggtccagccttccctgtagccagacagtttatgagcccagagcctcctgccacacacatgcacacatatctagcattctttccagacagcatcctccccgccttccaccttggtagatgcaaggtctatctctcccatcagggctgccaaagctgggctttgtttttcccagcagaatgatgccattctcacaaaccaatgctctatattgcttgaagtctgcatctaaatattgatttcacgttttaaagaaattctcttaaattacaattgtgcccaatgcagggtggctctggggggcaagtaggtggtacaggggattggaaacatgctccgcgcctccagagaaaagttgctcccgaggtccatgcccctggaacgtgttcctatcactctggctggttgggctggtccttagactgggtgcttatgattaaagggtcttggttagcccactttccctctccatgtggagatggaaggtagagaaggatacagtgtctatcctcaagttgctacggttcagtgagagaggcagacatctgaacaggcaggtaggattcagtgtgctcagtgcactggggatttggagagagatgggcttgctctctctgtgcacccaggagggccacgcacttaaaactgtgtttgtggatcagagaaggctttatagcacagggggcattcagatgagtcttagaggaagagaagaaacatggcaagcagattacatctgagccgtttgaattgtgtttttctttcttcccatgtttattttctaagatctacctgaacttagagactcaagatatttttttaggaaacctcctacccatgtctgaggtagcaagtgcagcctcacgacagataccaggcaatccagagccacaaaacgtgattcctccaggctctgcctggcctgaccctgtcctgtcagctgggtttacataccagtcccattcttccttttcaatacctacccccaaatcttctcctaaccaccatctgttttttttttttaaagcattttttgctttaaaagcatcctgaccccaatttctttgagctcacgggccttttgctgaaggtctctcagggtgtagtggtgtggctctctggacttaacgtcactctcagaggtcagaaccttggagatcagaactgattctcaccaggtgtgagaggtgtggtagcagattgcaatgctctgcacctcttccttgcaagtgagcaacttcaggctctctgggcagaggctggcccactgtagtttgcagacatgctctccagatggttttactaagtcccctctccctgatagggaatcctgctggaccagcgcagccctggtgtggagaggttaaaagacttgcacaggatcaccaagtcatgctgtagagccaggattcctagacccagggctctgcactctcaaggctggccccatgtgctcaaggggatctaatgtttgggctccaaactaaccatctcggagctgggctcctcatttactgccaaaccctcagcttatgtagctagaaagggccctggagtgagaaagcctggattttcaaattgatgctcccctactgactagctgtgccactctgggcaaatgctcttccttgagcctgtttccacacctgtaaagtggggatgatgatcctatctcactgcttttgtgaggattacaggaaagcacctgtcctggctctgtacctggcacgtagtaggtgctcagttcatgctggtttccttcctgcctttagtagggacctgctctgtgctcacacctcggctgcatgcaccctgctgtgacggaggctagtgtggaagaggtcctgtcctcagggaattaactgtcttattgggagacaacaactgtcctccttggaacacccaagaaaccatgcaaagcagtggacaacacagaacacgccctcctcctcgctgcctgcagctccaatctgattctgcttgggaatgggcggagcacgtgggctgcttaactgctgtataggacaagccccttacccctctctgggcccatgaattcctggcttggtttatgttctgatttgacacactgattttaatcttcgaatcatgacactgagtgcagaggaggtggcattccgacagcaggacatacatgttggtgtgaagactgggacgacactgggtagaatctagtttttaattattattaatataaaggatcaaattaatttaaatatgattctgaagtctacagaacttttagttctgtgctgtctatgtggacactttggtaaaatgcaaattatgatatggacgttatcattggtctggtgagatgtttcatatttgtgacagttaatttaaaaattatgagttaatgctgcctgtgtctatggggttctgtcttctttgatagccatctattcatctggatcatgggaccctctctaatccttccaccaatcaaataagctattgctattggtttggagttgagatatcagtctcggaaacttctgaaaaatgctaataattacccaaggattatgtcaaattttaaaataaatgtgtgtgtgtttctttaaaaaaaaaaaaaaaa

SEQ ID NO: 2130 - DNA, 158 bp, Homo sapiens
gtatgggccttttaggcttgggccagccagctttcttgagatgagtgaataaaaacctattgtaatttcatgtctgcttcccctcatggggacagtgccacccaggaactgctgctgaggcctgggaagctcccttgccttcgggtttggagcagtgg

SEQ ID NO: 2131 - DNA, 5220 bp, Homo sapiens
gcagccgcagctcgggggcggtgcctgccttgcagcctcccctcggcgatcgcgcagccccatctttgtccggcctccgcgctttgttctcggcgcccgggccttggccagcctggccagccgccgagcagcccccacgccgcgctggcgtcgtcctcgcctccctcgccgccgccccccgcgcgcggccgggccttgccccccatggtgtcccggccagagcccgagggcgaggccatggacgccgagctggcggtagcgccgccgggctgctcgcacctgggcagcttcaaggtggacaactggaagcagaacctgcgggccatctaccagtgcttcgtgtggagcggcacggctgaggcccgcaagcgcaaggccaagtcctgtatctgccatgtctgtggcgtccacctcaacaggctgcattcctgcctctactgtgtcttcttcggctgtttcacaaagaagcatattcacgagcatgcgaaggcgaagcggcacaacctggccattgatctgatgtacggaggcatctactgttttctgtgccaggactacatctatgacaaagacatggaaataatcgccaaggaggagcagcgaaaagcttggaaaatgcaaggcgttggagagaagttttcaacttgggaaccaaccaaacgggagcttgaactgctgaagcacaacccgaaaaggagaaagatcacctcgaactgcaccataggtctgcgtgggctgatcaaccttgggaacacatgcttcatgaactgcatcgtgcaggccctgacccacacgccacttctgcgggacttcttcctgtctgacaggcaccgctgtgagatgcagagccccagctcctgtctggtctgtgagatgtcctcactgtttcaggagttttactctggacaccggtcccctcacatcccgtataagttgctgcacctggtgtggacccacgcgaggcacctagcaggctacgagcagcaggacgcccacgagttcctcatcgcggccctggacgtgctccaccgacactgcaaaggtgatgacaatgggaagaaggccaacaaccccaaccactgcaactgcatcatagaccagatcttcacaggcgggttgcagtcagacgtcacctgccaagtctgccatggagtctccaccaccatcgaccccttctgggacatcagcttggatctccccggctcttccaccccattctggcccctgagcccagggagcgagggcaacgtggtaaacggggaaagccacgtgtcgggaaccaccacgctcacggactgcctgcgacgattcaccagaccagagcacttgggcagcagcgccaagatcaagtgcagcggttgccatagctaccaggagtccacaaagcagctcactatgaagaaactgcccatcgtagcctgttttcatctcaaacgatttgaacactcagccaagctgcggcggaagatcaccacgtatgtgtccttccccctggagctggacatgacccctttcatggcctccagcaaagagagcaggatgaatggacagtaccagcagcccacggacagtctcaacaatgacaacaagtattccctgtttgctgttgttaaccatcaagggaccttggagagtggccactacaccagctttatccggcagcacaaagaccagtggttcaagtgtgacgatgccatcatcaccaaggccagcatcaaggacgtcctggacagcgaagggtacttgctgttctatcacaaacagttcctggaatacgagtagccttatctgcagctggtcagaaaaacaaaggcaatgcattggcaagcctcacaaagtgatcctccctggcccccccctcccccaagtctcccgccgcctccccggcctggtgacaccacctcccatgcagatgtggcccctctgcacctgggacccatcgggtcgggatggaccacacggacggggaggctcctggagctgctttgaagatggatgagatgaggggtgtgctctgggtgggaggagcagcgtacacccgtcaccagaacatctcttgtgtcatgacatgggggtgcaacgggggcctcacagcacagagtgaccgctgcctggcgttccccagcactcggtgtggaaaggcccctacctgctgtaagattatgggtccatgaaagcagtaagctggacacagaggtgtagtgtgcgggacagagggccttgcagatgcctttctgttggtgttttagtgttaaaatacggagagtatggaactcttcacctccattttctcagcggctgtgaagcagcctcctagcttcggaagtacggacactacgtcgcgttttcaagcgtgtctgttctgcaggtaacagcatcaagctgcacgtggaagcatctcgcggttttctagaaacaggcattttcttatccctctcccgctcctttttccacaaaggtgaatttcataaatgtaatactagtaaagtgaatgaattactgagtttatacagaaatttaggtaacttctcctttagtctcaagagcgagtcttgctttttaatgggtgccgtttatgttgctgcccgccctgtgtgcctggctcctctgggtgccttggtgtctgctggtggctggcagtgggcgcagcggaggagagttgtgctgcagctcatacggtgtgtctgtcatctcagtctggagtaaatgcagtgtctgccggtgtctgatgggttctgtccctcgtattttctttgccttctatcccattgcctggctaccgctgcctggcagccaagggtgttggtcgcgaagctggagtggcctctggtggagcctgcatcttgtctcgtctgcctctgctttacatttggtgtactttcgggcgtggtggcagtaaaatgacaccgtgattgagcttgtcagcagagctgaaagagaaagtagaaggatgtgcattgtttcttgtaagatatcttgcatgtatctgtgtattcaaattcaaacagagatggtttgtccatttgtccactgagaaattagaaactagggacaagggggaggaaaagtactgaaatacagtttatgaagcaagtgtgtctcgggctgtgcttgtcccaggagccccagcagcatctgaactgaggcttcttcagtcctgcaggaacaggatcatctgtctcagcggtgggcagatgttttcatagacagccagggagtaaacactgttggctctgtgggctgtatggtctctgccataaatagtacagagatgtggctgtgtctagtacaacttttagacacagaaatctgaatgacatatattgttctgtgtcaagaaacttagattttttttttaactatttaaaaacgtgaaacctattcttagctcacaggccatggagaagctggtggggaccagacccagctccttagctggctgggctggggagggggtagtgacagtggcagctgctactcactgctcagtgtggaaaacacaggacttggcaatcacagcccgcagaaccatcatgtgtggcagaagcctgagggatgcggtttcttgcccacgtgctctgttcattttctgttgtttttctgcacttaaagaattcacatggaagcatgttttataaaatgaattaccagagaaacagagatgggccgagattttcagaaatggtcccatgtgaccaagttctgctgtttgggtgacagtgctttgaagatctcctttgaggatgtgcagtctttttttttttttttttgagatggagtttgttgcccaggctggagtgagtggcacagtctcggctcactgcaacctccacctcctgggttcaagcagttctcgtgccgcagcctcccaagtagctgggactacaggcatgcaccaccacgccaggctaatttttgtatttttagtagagatggggtttcaccatgtctcaaactcctgacctcaggcgatccacccacctcagcgtcccaaagtgctgggattataggcgtgagccaccgcacctggcctatgagtggtcttttaattaggaacaaatctaatggaaaggagagttgactgaagttggcccacaggattgtgagctgggcagtgccttcatgaaggcttgccaccttgggacgccccagtttactggggtgtcttgcggagtgcagaaggctttctggcagctgcctgggtttggccagaccctgcctcccctcccgccggccaacccctagtccccttcctgtctccacttgcattcaggggtggctgctgttctgagaacattagaactgggaagagagatggagtcacatggatttttggtgggcattattctaaactttcgtatccaagttagtcccccttattccactgtggcattgccgttctaagcagttacctgatgcctgctgctgaagagctgctcacaggaggcggcggcggccctggcactgccccttgcattaggtcttgtgtttgatgtgttcttgtgaatttactttgtcagaacaaaatatttacgcgttgggttcaggaatttcttttagctccccatctggctgtgaaattcaggaaacctcccgttgcctagtaatcaccccatgtaggtgtacattgtgacaaagtgcatctgaccactaaggggcccccttggtgaccccagcacattcacagcagtgttaaaatggcctgcattttggagatgctggctggcctttcagtgcctcccaggaagacacatggcctttccctcttcagatgcctgaagggagtgctttgaggcaggtgatgtgctgggagtgtgggcggcctccctctggccccggggccctctgtggaccttggctccctccgtggacctgggcttcgtggtgagcactgcagcctccctgggcattccctccagcgccagcaccactgcaacatatagacctgagtgctattgtattttggcttggtgtgtatgctcttcattgtgtaaaattgctgttcttttgacaatttaagtgattgttttgtttactgtaagtttgaaaataaaaatgaagaaaaaaattccaatgactgtgctgtggttggagactttatttaccaagatgtttactcttcctttccccttccattttgaggagctgtgtcactcctcctcccccccagtgctttgtagtctctcctatgtcataataaagctacattttctctgagaa

SEQ ID NO: 2132 - DNA, 4704 bp, Homo sapiens
acttccttttcgtggcactataaagggtgctgcacggcgcttgcatctcttcgcctctcggagctggaaatgcagctattgagatcttcgaatgctgcggagctggaggcggaggcagctggggaggtccgagcgatgtgaccaggccgccatcgctcgtctcttcctctctcctgccgcctcctgtctcgaaaataacttttttagtctaaagaaagaaagacaaaagtagtcgtccgcccctcacgccctctcttcctctcagccttccgcccggtgaggaagcccggggtggctgctccgccgtcggggccgcgccgccgagccccagccgccccgggccgcccccgcacgccgcccccatgcatcccttctacacccgggccgccaccatgataggcgagatcgccgccgccgtgtccttcatctccaagtttctccgcaccaaggggctcacgagcgagcgacagctgcagaccttcagccagagcctgcaggagctgctggcagaacattataaacatcactggttcccagaaaagccatgcaagggatcgggttaccgttgtattcgcatcaaccataaaatggatcctctgattggacaggcagcacagcggattggactgagcagtcaggagctgttcaggcttctcccaagtgaactcacactctgggttgacccctatgaagtgtcctacagaattggagaggatggctccatctgtgtgctgtatgaagcctcaccagcaggaggtagcactcaaaacagcaccaacgtgcaaatggtagacagccgaatcagctgtaaggaggaacttctcttgggcagaacgagcccttccaaaaactacaatatgatgactgtatcaggttaagatatagtctgtggatggatcatctgatgatgatggataaatttgatttttgctttgggtgggctcctcttggggatggattatggaatttaaaccatgtcacagctgtgaagatctggcacaagatagaatggtaaaaaaaaaaaaaattttaagtgacagtgccatagtttggacagtacctttcaatgattaattttaatagcctgtgagtccaagtaaatgatcactttatttgctagggagggaagtcctagggtggtttcagtttctcccagacatacctaaatttttacatcaatccttttaaagaaaatctgtatttcaaagaatctttctctgcagtaaatctcgcaggggaatttgcactattacacttgaaagttgttattgttaaccttttcggcagcttttaataggaaagttaaacgttttaaacatggtagtactggaaattttacaagacttttacctagcacttaaatatgtataaatgtacataaagacaaactagtaagcatgacctggggaaatggtcagaccttgtattgtgtttttggccttgaaagtagcaagtgaccagaatctgccatggcaacaggctttaaaaaagacccttaaaaagacactgtctcaactgtggtgttagcaccagccagctctctgtacatttgctagcttgtagttttctaagactgagtaaacttcttatttttagaaagtggaggtctggtttgtaactttccttgtacttaattgggtaaaagtcttttccacaaaccaccatctattttgtgaactttgttagtcatcttttatttggtaaattatgaactggtgtaaatttgtacagttcatgtatattgattgtggcaaagttgtacagatttctatattttggatgagaaatttttcttctctctataataaatcgtttcttatcttggcattttaatcaatctcttgtcatgattatagaggtttagctaaaagtattttttcttagaagacaggttctataaactgaatctctgttgcacactggtcatgctggaaaaacatttgatgaggaatgaagatgctctgtatatacatgtttaggttttacaggaaacacaggagtagcatgttttaaaaatttctaaagtcaaaacatggacacattcacaggctaatgatctcatgaaataaggataagagaccacggtagcatctaccaaaaatgtgatactcaaaggattacatttcattgcttccctgttgaagtgaagatataaatgttccattctgacccacctttgaaaaacaattactttgccccatggattctttgttcaattagaaatttccccggggcaggtgacccatagtcttaaagaacaggctaaacaccacagagagattggttgctttttgcttttcatcacctgcaagatgtacataaaaatcacataagctggaattcaacaaaaggtatgtttatgaacttttattctcaaaagttgaaatgctgactttctcgattcctcattttcagacttttatttcagataaatactaaaaacctaagtgaaccttgataatgctgtagtgtagattacttcactaccccatataatagaaggacttgctgtttagttgtagaggataacagcgtttttcagtggaaattgaaagtggaaaaattgaattttgctctacacagttaacatatagtggcctttttttggtatatatgtaaacatgttgacactggaaatacgcagtctgaaataaaattagtaattacttgaaattagtaatctcaaataacttttaagaagttatttctacacccaggaataaattattctgattttgtagacaacacaggaataggccactgaatatgcaggtatttagagtacaaatgtctgtggatattattggcacaccattctcgagagttagaattcgtagacccgcaacacatggactacccttgccaattgttatggttttatttttaaacctattctgtgaaaaagctcctcggtatttcaaacttgaattacaataaaaacaccaggtagggttgtttttaaatgggtctcaccccagtgctgactactgttgtttaccaactacatttcatctggtaactccattgaaactaagtacctcaaccattttttttttttatcataaagccttttttcaaatggaaagttgtttttgaagatcttgacatcagactttttcaatctttgaaaatgatggaaacagttaataaaaatgtttattttagaattcaggtgatgtctggcttgtgaggagctgtttataagtttgtctttgaaaaaggcttgcacacatcactctgagaccagctgtttcctgtgactttaaccttaccttccccagacaattgagctgaacctgtatctgcggtacagtagctgtttgtgatgtatttcttgttcactgtttctggggaatgttttgaaatattttattataaatccttttaagataggatgactactttcaaaattattgttgcctttggcaccaggaattcatagttgtgattggcagtaagtttgaggagtgttactttctaagttttaacaggtagttttgaaattatttccttttttccaaatttaagtagtgcctccctctgtaatgttgaaacaaggcttcaagtggattgtatagcaagagttaccctggttcatgcaggataatgcggctgttatctttgtcatctggaatgggaatctcatgtctttatccttatgtgcaatatttctataataatagactggaaaggccaccagaaagtggctttcaggtacattgcacaaatagtttccttaagtcattataactcacacattgcaagtaattaattttgttttgtataggtgttgcagtttatgaaattggccttcaagttaaaaggaaggaagccgtattcccgatggctagtgtttaatgactacaggtttccaggctccctttaatcttgggagcaaataaatctactattggacttctccctgcgtgacttttaacatttctgatactctctcttcttcctctttacagaagagaggtatgataactgaagttgtactttgcatattgaagtttaaagatacttcctctccccttttcacccctatttcaaatgatgtgataaaatcctcttgataggctatatggagaacatttgtcaatagttttatctatgcatggaagtcttcaaaaagtatatcttggattgtctaaaactgaatagatttcttatttatctgaaggtatacagactgccaacattttagacttatctctcagtctctgccactgaacttttatatatggctgctatcaaaatataaccggtttattttcatatttggaactaatataacagtatcacaaaatcttttacagtaagatagtttgtaataccagccgacccagctgcttaactgagtccttaaatcatttaatatatgggactgtaaatagagaaatctgtacattatgagatctgatttctggttatgcctatagatctttattttctttatccctatagatcattttcttctgatgttaagtgttatatttttgaaatgctcctaaacaagtaagccttagattgtattaatcctgaggattgataccatttcctcaacactttgtggagtatgattgacaccagtttttttttgactgcaggtttaacttggcttatcacttttcgtattgctcagtatgtccaagataggaataaaaaaatgtagttcaaaaaaaaaaaaaaaaaaaaaaaaaa

SEQ ID NO: 2133 - DNA, 7523 bp, Homo sapiens
ccccgcgcccgctgctcgctgcggagccgttttgtgccgcggcgcgggggaacggggacgcggggcggggggcgcggagccggcgggcgcagcctcagcatggacgtgacagtctcggagctcctggagctcttcctgcagagcccgctggtgacctgggtgaaaacttttggcccgtttggaagcggcagccaggacaacctgactatgtacatggatttagtggacggcatctttttgaaccaaattatgctgcaaatagatcccaggcccacaaatcaacgcatcaataagcacgtcaacaatgatgtgaaccttcgcattcagaatttgaccatcttggtgagaaacattaagacctactaccaggaagttctccagcagctgattgtaatgaatttgcccaatgttttgatgattggcagagacccactgtctgggaagagcatggaggaaatcaagaaggtgctgctgctggtgctgggctgtgctgtccagtgtgagaggaaagaggagttcattgaaagaatcaaacagctggacattgagacccaggctggcatcgtggcccatatccaggaggtgactcacaaccaagagaacgtgtttgacctgcagtggctggagctgcccgacgtggctccggaggagctggaggccctgtcgaggagcatggtgctccacctgcggaggctcatcgaccagcgggacgagtgcaccgagctgatcgtggacctcactcaggaacgggactacctgcaggcacagcatccacccagccccatcaagtcctccagcgccgactccactcccagccccaccagcagcctctctagcgaagacaagcagcacctggccgtagagctggccgacaccaaggccaggctgcggcgcgtcaggcaggagctggaggataagacagagcagcttgtggacaccagacatgaggtggaccagctggtgctggaactgcagaaagttaagcaggagaacatccagctagcggcagacgcccggtctgctcgtgcctatcgagacgagctggattccctgcgggagaaggcgaaccgcgtggagaggctggagctggagctgacccgctgcaaggagaagctgcacgacgtggacttctacaaggcccgcatggaggagctgagagaagataatatcattttaattgaaaccaaggccatgctggaggaacagctgactgctgctcgggcccggggcgataaagtccatgagctggaaaaggagaacctgcagctgaaatccaagcttcacgacctggaattggaccgggacacagataagaaacgaattgaggagctgctggaagaaaacatggtccttgagattgcacagaagcagagcatgaacgaatctgcccaccttggctgggagctggagcagctgtccaagaacgcagacttgtcagacgcctccaggaagtcgtttgtgtttgagctgaacgaatgtgcgtccagccgcatcctgaagctggagaaggagaatcagagcctccagagcaccatccaggggctgcgggacgcgtccctggtgttggaggagagcggcctcaagtgcggggagctggagaaggagaaccaccagctcagcaagaagattgaaaagttacaaacccagctggagagagaaaagcagagcaaccaagatctggagaccctcagtgaggagctgatcagagagaaggagcagctgcagagtgacatggagaccctgaaggctgacaaagccaggcagatcaaggaccttgagcaggaaaaggaccacctcaaccgagccatgtggtcgctgcgggagaggtcgcaggtcagcagtgaggcccgcatgaaagacgtggagaaggagaacaaagccctccaccagacggtgacggaggccaatggcaagctcagccagttggagtttgagaagcggcagctgcacagggacttggagcaggccaaggagaagggggagcgggcagagaagctggagagggagctacagcgactccaggaggagaacgggaggctggccaggaaggtgacctccctggagacagccaccgagaaagtcgaggccctggagcatgagagccagggcctgcagctggagaaccggactctgaggaagtctctggacaccttgcagaacgtgtccctgcagcttgagggcctggagcgtgacaacaagcagctggacgcagagaacctggagctgcgcaggctggtggagaccatgcgcttcaccagcaccaagctggcacagatggagagggagaaccagcagctggagcgtgagaaggaggagctgaggaagaacgtggatctgctcaaggcgctgggcaagaagtcagagcgcctggagctcagctaccagagcgtgagcgctgagaacctccggctgcagcagagcctggagagcagcagccacaagacgcagaccttggagagtgagctgggcgagctggaggctgagcgccaggcgctgcggcgggacctggaggccctccggctggccaatgcacagttggagggggccgagaaggacaggaaggccctggagcaggaggtggcccagctcgagaaggataagaagctgctggagaaggaggccaagcggctgtggcagcaggtggagctcaaggatgcagtcttggacgatagcactgccaaactgtccgccgttgagaaggagagccgcgcgctggacaaggagctggcccgctgcagggacgcagccggcaagctgaaggagctggagaaggacaaccgggacctcaccaagcaagtcaccgtgcatgcaaggacactgacaactctgagggaggacctggtgctcgagaagctgaagagccagcagctcagcagtgagctggacaagctgagccaggaactggagaaggtcggcctcaacagggagctgctgttgcaggaggacgacagcggcagtgacacaaaatacaagattttggagggcagaaatgaatcagcattaaaaacaacactagccatgaaagaagaaaagattgtgctcttagaagcacagatggaagagaaagcgagcctaaatcgccagttagagagtgagctgcagatgctaaagaaggagtgtgagaccctcaggcagaaccagggagaggggcagcacttgcagaactctttcaagcaccctgcggggaagacagccgccagtcaccaggggaaggaggcctgggggcccggccataaggaagccaccatggagcttctccgagtgaaggaccgggccatcgagctggagcggaataatgcagctctgcaggctgagaagcagctgctaaaggaacagctgcagcacctggagacccagaacgtgaccttcagcagccagatcttgacactgcagaaacagagcgccttcctgcaggagcacaacaccacactgcagacccagaccgccaagctgcaggtggagaactccacgctgagttcccagagcgcagcgctcaccgcgcagtacacgctgctgcagaaccaccacacggccaaggagacggagaacgaaagcctgcagaggcagcaggagcaacttacagcggcctacgaggccctgctgcaggaccacgagcacctgggcacgctgcacgagcggcaatcggccgagtacgaggccctcatccgccagcacagctgcctaaagacactgcatcggaatctggagctggagcacaaggagctcggggagaggcacggtgacatgctgaagcgcaaggcggagctggaggagcgggagaaggtcttgaccactgagcgagaggcgctgcagcaggagcagaggacaaacgccctcgccatgggcgagaaccagaggctgcggggcgagctggacagggtcaatttcctgcaccaccagctgaagggggagtacgaggagctgcacgcccacaccaaggagctgaaaacctcactgaacaacgcgcagctggagctcaaccgctggcaggcccgcttcgacgagctgaaggagcagcaccagaccatggacatctcgctgaccaagctggacaaccactgtgagctgctctcccgtctcaaggggaacttggaggaagaaaatcatcacctcctgagccagatccagctgttgagccagcagaaccagatgcttctggagcagaacatggagaacaaggagcagtaccatgaggagcagaagcagtacatagacaaattaaatgccttacgaagacataaggaaaagctggaagaaaaaatcatggatcaatacaagttctatgatcctcctccaaagaagaagaaccactggattggagccaaagccttagtcaaactcatcaaaccaaagaaagagggttcgagggaacgcttaaaatccaccgtggacagccctccctggcagctggagtcctcagaccccgcctcgccggcggcctctcagccgctcagatcacaggccgagaaccccgacacccccgcactgggctccaactgtgcagaagagcgcgacgcccacaacgggtctgtggggaaaggccctggggatctaaaaccaaagcgaggctccccacacagaggcagccttgaccgcacagatgcctccaccgatctggccatgaggtcctggccctcggagctgggctcccggacttgctcaacttcagccaccactacagccccttccaactccacccccatcgcccggcacccaggccgcaccaaaggctataactcagatgacaacctctgtgagccatccctggagtttgaggtccccaaccacaggcagtacgtgtcgcggccaagtagcttagagagcagtagaaacacatccagcaacagctcacctcttaacctaaaaggctcctccgagcagctccatggccggtctgagagcttcagcagcgaagacctgatccccagcagggacctggccactttgccccgggaagccagcacaccgggacgcaacgccctcggccgccacgagtaccccttgcctcggaacgggcctctcccacaggagggtgcccagaagaggggcacagcccctccctacgtcggagtgcggccctgctcggcctcccccagcagtgagatggtcaccttggaggagttcctggaggagagcaaccgcagctcccccacccatgacactcccagttgccgggatgacctgctgagtgactacttccgaaaggccagcgatcccccagccatcggaggccaaccaggaccacctgccaagaaagaaggggccaagatgcccaccaactttgtggcccccaccgtcaaaatggccgcccccacctcggaggggaggccgctgaagcccgggcagtacgtaaagccaaacttcagactgactgaggccgaggccccacccagcgtggccccgagacaggcccagcctccccagagcctgtctctgggcagaccccggcaggctccggtgcccccagcttcccatgcacctgccagccgcagtgcctccttgagccgggccttcagcctggcctcagctgaccttctccgggccagcgggccagaggcctgcaaacaggagtcccctcagaagctgggggctcctgaggccttagggggcagagagacaggcagccacaccctgcaaagccccgcaccccccagctcccatagcctggcccgggagcggaccccacttgtgggaaaggctggcagctcctgtcagggcccaggtccccgcagccggccgctggacacgaggcgcttctccctggctcccccaaaggaggagaggctggcccccctgcatcagtctgccacagcccccgccattgccactgcaggtgctggtgctgctgctgctggcagtggcagcaactcccagctcctgcacttctcacctgctgcagccccggctgccaggaccaagcccaaggcgcccccacgctcaggggaggtggccaccatcacccctgtccgggcagggctcagcctctcagagggagacggggtcccggggcagggctgcagtgaggggcttccggccaagagcccaggtcggtctcccgatttggctccccacctcggccgggccctggaggactgcagtcgagggagcgtctcaaagagcagtccggcctccccggagcccggcggggatccgcagaccgtgtggtatgagtacggctgtgtgtgactgtctcgtggttgagctcgcaaacctgaaaactactgacgcgccttccgactctcacggccttttctcttgcttgcctgcggtgccaggagagggtttggaatgaggaaaggggttcccacgcatttctgctgtttgttctgtgaatggaaacactgtgccaagccccaagaggattacgcttccaggtgtgtaacgtgttttctgtgtctgccgcttccagcagctgatatctttggaacaaataatccacgtcagcatggggaccaattaggatgcaatgacaaactgacttcccccaaagcagacactactccagtatgtcccagtagaacactcatttgcaatgtgttgagctccgttaagcacacacacactcacacaacaggcttacgaggctcaggcctggcgggtcagaaagcccactccctctcccaaggccactggatcccaggagaagcccagactggcgatactacaaaggtctccagggcctggcagaccccagagtcaggcctgctgttaaaaagtgagagtgctgctgttccattcctggggtcccaagcacttccctttaccccaggacccagggcagcctgcagggcagctggcggtggccttggccatttgcccccagcctccagctggctcctgagctctgcaccagggggtttggggaccacacaggcacctgccttcctagatttccctggctcacttttctgcaaacactggatctgccaggcctggggattggggggcaggaaagaggcccccatccagccccctccaggccagtgtgcacagtgcaccgaggggtcatccgcacagagcgaggtgcaagctcgatgtgtaacctggctgcggcacccgacatccccggtctcggggtgttgatttatttctgaataactttttgggtatagaaaccaattttttttaatatatgacatgtatatgtacacactcatgtgaaatatgtatactttggggggatctatttatgttccagtgggagtcactctcttctgtcgggaatcttatctgctgctttgtgtctttggtcagattcctgacaatttagtttcctgttgtaaaggtgcttttcctggggtgaactaaacctattgattttttttttttaagatttttttttccttttgatttaatatactgagaaagaaatgggagacttttgaatgttaacaagatccattttaggagtgtttggggttgtgtattaaatagccattcattctggaactcaaggacaggactgtaataaaatggaatggaaccgaaaaaaaaaaaaaaaaaaaaaaaaaaaaaaaaaaaaa

SEQ ID NO: 2134 - DNA, 2051 bp, Homo sapiens
ggagacgcgggacccggagccccgcgggccaccgcccctgccggccgcgcagctgggaggatgcggacggcagcgagagcgtgcgcggccacgtgacggccgctataagagcgcacggggcagacgctcggttccccgccgtgcctcctcgctggccgcgctccctcccggtgccggcttctctgagtcaccaacctgaggctgccccggccgcctgcgcacccggcagcaccatgacagatcaggcctttgtgacactaaccacaaacgatgcctacgccaaaggtgccctggtcctgggatcatctctgaaacagcacaggaccaccaggaggctggtcgtgctcgccacccctcaggtctcagactccatgagaaaagttttagagacagtctttgatgaagtcatcatggtagatgtcttggacagtggcgattctgctcatctaaccttaatgaagaggccagagttgggtgtcacgctgacaaagctccactgctggtcgcttacacagtattcaaaatgtgtattcatggatgcagatactctggtcctagcaaatattgatgatctttttgacagagaagaattgtcagcagcaccagacccagggtggcctgactgcttcaattccggagtcttcgtttatcagccttcagttgaaacatacaatcagctgttgcatcttgcttctgagcaaggtagttttgatggtggggaccaaggcatactgaacacattttttagcagctgggcaacaacagatatcagaaaacacctgccgtttatttataacctaagcagcatctctatatactcctacctcccggcatttaaagtgtttggtgcaagtgccaaagttgtgcatttcctgggacgagtcaaaccatggaattatacttatgatcccaaaacaaaaagtgtcaaaagtgaggcccatgatcccaacatgactcatccagagtttctcatcctgtggtggaacatctttaccaccaacgttttacctctgcttcaacaatttggccttgtcaaagacacctgctcatatgtaaatgtgctttcagacttggtctatacactggctttctcttgtggcttctgtagaaaggaagatgtctcaggagccatatcacatctgtcccttggggagatcccagctatggcacagccgtttgtatcctcggaagaacggaaggaacgatgggaacagggccaggctgattatatgggagcagattcctttgacaacatcaagaggaaacttgacacttacctccagtagaaacactgcatttttctgtgaacacatccacttcacaagccttgtttctgatacttagtatctagagctgggttgagaaaagtctgttacagttgctagaggttttcattaaaacttatcagatgagaggcttttttaggataagaggtgagaactgggcaaaagttgtgaagcagcaattctgttatatggacagtgttctgctttttaatcctatttagcttgtttcagaaattctcacttttgttgactgccaacatacaaagtaagggaaactcaagatattaagatggctgtatcagttcttaaaatctgcagagcctggttcaaaatcagtcactcccttcagaagcagacatggcatctgttccttgcttgcttgttggttgtgtacctttcacgagacctgaattttagaattgcccagtgctgccagagtgagtgagtgtaattctcctttcaggtaaagataggctatctcaacactgctgagtgattcataaacatatcaaccaatagcattaacccattttatttcctgtccttagtgtctgaagatgctcaccagttttctgtgtacagtaaggcagcatgctaaaatgcttttgttcagttctgtatatttgaaaatagcagtgtgttctctgatggttacctgcagtggcaccctgtacaaaaaataaaagacttattgctgtatcttggttgtttaattaaattaaggaatttcaccataaaaaaaaaaaaaaaaaaaaaaaaaaaaaa

SEQ ID NO: 2135 - DNA, 456 bp, Homo sapiens
atggaagccccagcacagcttctcttcctcctgctactctggctcccagataccaccggagaaattgtaatgacacagtctccagccaccctgtctttgtctccaggggaaagagccaccctctcctgcagggccagtcagagtgttagcagcagctacttatcctggtaccagcagaaacctgggcaggctcccaggctcctcatctatggtgcatccaccagggccactggcatcccagccaggttcagtggcagtgggtctgggacagacttcactctcaccatcagcagcctgcagcctgaagattttgcagtttattactgtcagcaggattataacttacctcccacagtgattcaacatgaaacaaaaacctcaacaagaccatcagtgtttactagattttaccagctgcttcctttacagacagctaatgtggccactcagttttag

SEQ ID NO: 2136 - DNA, 1313 bp, Homo sapiens
cacgaagcgccgctgggtctgggtgcccggaggcagcagcgttcgcggagttcgcccgctggcccccgatcaccatgtcggctttcgacaccaaccccttcgcggacccagtggatgtaaaccccttccaggatccctctgtgacccagctgaccaacgccccgcagggcggcctggcggaattcaaccccttctcagagacaaatgcagcgacaacagttcctgtcacccaactccctgggtcctcacagccagcggttctccagccatcagtggaaccaacccagccgaccccccaggccgtggtgtctgcagcccaggcaggcctgctccggcagcaggaagaactggacaggaaagctgccgagctggaacgcaaggagcgggagctgcagaacactgtagccaacttgcatgtgagacagaacaactggccccctctgccctcgtggtgccctgtgaagccctgcttctatcaggatttctccacagagatccctgccgactaccagcggatatgcaagatgctctactatctgtggatgttgcattcagtgactctgtttctgaacctgcttgcctgcctggcctggttctcgggcaacagctccaagggagtggactttggcctctccatcctgtggtttctgatcttcactccctgtgccttcctttgttggtaccgacccatctataaggcctttaggtccgacaactctttcagcttctttgtgttcttctttgtatttttttgtcaaatagggatctacatcatccagttggttggcatccctggcctgggggacagcggttggattgcagccctgtctacactggataatcattccctggccatatcagtcatcatgatggtggtggctggcttcttcaccctctgtgccgtgctctcagtcttcctcctgcagcgggtgcactccctctaccgacggacaggggccagcttccagcaggcccaggaggagttttcccagggcatcttcagcagcagaaccttccacagagctgcttcatctgctgcccaaggagccttccaggggaattagtcctcctctcttctctccccctcagcctttctctcgcctgccttctgagctgcactttccgtgggtgccttatgtggtggtggttgtgcccagcacagacctggcagggttcttgccgtggctcttcctcctccctcagcgaccagctctccctggaacgggagggacagggaattttttccccctctatgtacaaaaaaaaacaaagctctctttccttctctggtaaaaaaaaaaaaaaaaaaaaaa

SEQ ID NO: 2137 - DNA, 825 bp, Homo sapiens
atggcatgccctggcttcctgtgggcacttgtgatctccacctgtcttgaatttagcatggctcagacagtcactcagtctcaaccagagatgtctgtgcaggaggcagagaccgtgaccctgagctgcacatatgacaccagtgagagtgattattatttattctggtacaagcagcctcccagcaggcagatgattctcgttattcgccaagaagcttataagcaacagaatgcaacagagaatcgtttctctgtgaacttccagaaagcagccaaatccttcagtctcaagatctcagactcacagctgggggatgccgcgatgtatttctgtgcttataggaggggagcccagaagctggtatttggccaaggaaccaggctgactatcaacccaaatatccagaaccctgaccctgccgtgtaccagctgagggactctaaatccagtgacaagtctgtctgcctattcaccgattttgattctcaaacaaatgtgtcacaaagtaaggattctgatgtgtatatcacagacaaaactgtgctagacatgaggtctatggacttcaagagcaacagtgctgtggcctggagcaacaaatctgactttgcatgtgcaaacgccttcaacaacagcattattccagaagacaccttcttccccagcccagaaagttcctgtgatgtcaagctggtcgagaaaagctttgaaacagatacgaacctaaactttcaaaacctgtcagtgattgggttccgaatcctcctcctgaaagtggccgggtttaatctgctcatgacgctgcggttgtggtccagctga

SEQ ID NO: 2138 - DNA, 2354 bp, Homo sapiens; identical to SEQ ID NO: 2037

SEQ ID NO: 2139 - DNA, 1467 bp, Homo sapiens
gctgactggggtggttgggaccgttagctcggcaggctggcaggctccggggcgctactccattggcggccgggatggagactatgcgagcgcagcggctgcagcctggtgtgggcaccagcgggaggggcactctccgagcgctgcggcccggagtgactggggccgcggctgccaccgccacaccccctgcgggccccccgcctgccccgccgcctcccgcaccgcccccgccgccgctgctcctgtctggggccccaggactacccctgccccccggcgccgccggcagcccggcagtgctgcgagaggccgtggaggccgtggtgaggagcttcgccaagcacacgcagggctatggccgagtgaatgtggtggaggcacttcaggaattctggcagatgaagcagtcccgtggtgctgacttaaagaatggggctctagtggtttatgagatggttccctccaacagccctccttatgtctgctatgtcaccctgcctgggggaagctgctttgggagtttccagttttgccccacaaaagctgaggcccggaggagtgctgcaaagattgcgctaatgaattctgtgtttaatgaacatccttcccgaagaatcactgatgagttcatcgagaagagtgtctctgaggccctggcatcttttaatggcaacagggaggaagctgacaacccaaatacagggattggtgccttccgattcatgctggaatccaacaagggcaaatcaatgttggagttccaggagctaatgacagtttttcaactgctacactggaatggcagccttaaggccatgagggaacgacaatgctctcggcaggaggtgttggctcattattcgcaccgggccctggatgatgatattcgccaccaaatggccttggactgggtgagccgggagcagagtgtgccgggggcactgtctagagagctggcctctactgagcgggagctggatgaagcccgactggcaggcaaggagctgcgcttccacaaggagaagaaagatattcttgtgctggctgctgggcagttgggcaatatgcattcttccaactgctaggcatccacccacataactccccaggctttccacagcctttttttatgtctcctttctaagatttaggatgattttttgtacatactttctcatttttatactttaaaaaatatatatgtgtataaattctacacctagattcctatttgctaagagatcccttttcttactaccagtttttggatgtagttttatttgaaacatcttcagtccactttacaacaaagagcagcttgtctttgcagctttgttagctcttaaacttccagattaactgtgtagccatttcagtagcactaaaagattaactctaaaaaaaaaaaaaaaaaaaaaaaaaaaaaaaaaaaaaaaaaaaaaaaaaaaaaaaaaaaaaaaaaaa

SEQ ID NO: 2140 - DNA, 2210 bp, Homo sapiens
cgcgcccctccctcctcgcggacctggcggtgccggcgcccggagtggccctttaaaaggcagcttattgtccggagggggcgggcggggggcgccgaccgcggcctgaggcccggcccctcccctctccctccctctgtccccgcgtcgctcgctggctagctcgctggctcgctcgcccgtccggcgcacgctccgcctccgtcagttggctccgctgtcgggtgcgcggcgtggagcggcagccggtctggacgcgcggccggggctgggggctgggagcgcggcgcgcaagatctccccgcgcgagagcggcccctgccaccgggcgaggcctgcgccgcgatggcagagatgggcagtaaaggggtgacggcgggaaagatcgccagcaacgtgcagaagaagctcacccgcgcgcaggagaaggttctccagaagctggggaaggcagatgagaccaaggatgagcagtttgagcagtgcgtccagaatttcaacaagcagctgacggagggcacccggctgcagaaggatctccggacctacctggcctccgtcaaagccatgcacgaggcttccaagaagctgaatgagtgtctgcaggaggtgtatgagcccgattggcccggcagggatgaggcaaacaagatcgcagagaacaacgacctgctgtggatggattaccaccagaagctggtggaccaggcgctgctgaccatggacacgtacctgggccagttccccgacatcaagtcacgcattgccaagcgggggcgcaagctggtggactacgacagtgcccggcaccactacgagtcccttcaaactgccaaaaagaaggatgaagccaaaattgccaaggccgaggaggagctcatcaaagcccagaaggtgtttgaggagatgaatgtggatctgcaggaggagctgccgtccctgtggaacagccgcgtaggtttctacgtcaacacgttccagagcatcgcgggcctggaggaaaacttccacaaggagatgagcaagctcaaccagaacctcaatgatgtgctggtcggcctggagaagcaacacgggagcaacaccttcacggtcaaggcccagcccagaaagaaaagtaaactgttttcgcggctgcgcagaaagaagaacagtgacaacgcgcctgcaaaagggaacaagagcccttcgcctccagatggctcccctgccgccacccccgagatcagagtcaaccacgagccagagccggccggcggggccacgcccggggccaccctccccaagtccccatctcagccagcagaggcctcggaggtggcgggtgggacccaacctgcggctggagcccaggagccaggggagacggcggcaagtgaagcagcctccagctctcttcctgctgtcgtggtggagaccttcccagcaactgtgaatggcaccgtggagggcggcagtggggccgggcgcttggacctgcccccaggtttcatgttcaaggtacaggcccagcacgactacacggccactgacacagacgagctgcagctcaaggctggtgatgtggtgctggtgatccccttccagaaccctgaagagcaggatgaaggctggctcatgggcgtgaaggagagcgactggaaccagcacaaggagctggagaagtgccgtggcgtcttccccgagaacttcactgagagggtcccatgacggcggggcccaggcagcctccgggcgtgtgaagaacacctcctcccgaaaaatgtgtggttcttttttttgttttgttttcgtttttcatcttttgaagagcaaagggaaatcaagaggagacccccaggcagaggggcgttctcccaaagattaggtcgttttccaaagagccgcgtcccggcaagtccggcggaattcaccagtgttcctgaagctgctgtgtcctctagttgagtttctggcgcccctgcctgtgcccgcatgtgtgcctggccgcagggcggggctgggggctgccgagccaccatgcttgcctgaagcttcggccgcgccacccgggcaagggtcctcttttcctggcagctgctgtgggtggggcccagacaccagcctagcctggctctgccccgcagacggtctgtgtgctgtttgaaaataaatcttagtgttcaaaacaaaatgaaacaaaaaaaaaatgataaaaactctcaaaaaaa

SEQ ID NO: 2141 - DNA, 4360 bp, Homo sapiens; identical to SEQ ID NO: 690

SEQ ID NO: 2142 - DNA, 2550 bp, Homo sapiens; identical to SEQ ID NO: 1517

SEQ ID NO: 2143 - DNA, 1429 bp, Homo sapiens
ggaagttaaggaggggagggggtggagggaaaagcaagccaggaggtgcttgcggccgcttctagtagtttccaggcgctgccgggcggctggcactaagcggtcctgaggctgtggctacggctgctccggagctggtggcgccgcgataggagagccgatggccaagtggggtgagggagacccacgctggatcgtggaggagcgggcggacgccaccaacgtcaacaactggcactggacggagagagatgcttcaaattggtccacggataagctgaaaacactgttcctggcagtgcaggttcaaaatgaagaaggcaagtgtgaggtgacggaagtgagtaagcttgatggagaggcatccattaacaatcgcaaagggaaacttatcttcttttatgaatggagcgtcaaactaaactggacaggtacttctaagtcaggagtacaatacaaaggacatgtggagatccccaatttgtctgatgaaaacagcgtggatgaagtggagattagtgtgagccttgccaaagatgagcctgacacaaatctcgtggccttaatgaaggaagaaggggtgaaacttctaagagaagcaatgggaatttacatcagcaccctcaaaacagagttcacccagggcatgatcttacctacaatgaatggagagtcagtagacccagtggggcagccagcactgaaaactgaggagcgcaaggctaagcctgctccttcaaaaacccaggccagacctgttggagtcaaaatccccacttgtaagatcactcttaaggaaaccttcctgacgtcaccagaggagctctatagagtgtttaccacccaagagctggtgcaggcctttacccatgctcctgcaacattagaagcagacagaggtggaaagttccacatggtagatggcaacgtctctggggaatttactgatctggtccctgagaaacatattgtgatgaagtggaggtttaaatcttggccagagggacactttgccaccatcaccttgaccttcatcgacaagaacggagagactgagctgtgcatggaaggtcgaggcatccctgctcctgaggaagagcggacgcgacagggctggcagcggtactactttgagggcattaaacagacctttggctatggcgcacgcttattttagggccagcggcaggggactccagcctgctggacacttcagtccagctctctcctgactggggcttgcgactcacaggattgcatcgtcccagctgctaacttggggccggggcccctcccttccacatataccttgggtttgtgcatgttttctgctgggtgggttcagagggcaatttctcttttatgtgtacatatgctaaataaacataatttaaaaaacaaaaaaaaaaaaaaaaaaaaaaaaaaaaaa

SEQ ID NO: 2144 - DNA, 1280 bp, Homo sapiens
ccgctgttatacgtcacttccacggctcagcgtcaggcaagttggcctctctgttgtaaattagtggttaaggttatctattattgccacttttccagcgctaaaggctgttttggaaccagtgttgcttgttccgcgggtgattggcttttttttttggcaaaccagttattcaagtttctggtctttaaaaaactctgtggcggtacggtaaccgaggaggttccagcgcggcggaagtaccccgcgggtgggtgtgtgcgcaaggccagggccagaggggcacgtggcgccgggaggagagagaatgtcttttcgaggcggaggtcgtggaggctttaatcgaggtggtggaggtggcggcttcaaccgaggtggcagcagcaaccacttccgaggtggaggcggcggtggaggcggcggcaatttcagaggcggcggcaggggaggatttggacgagggggtggccgcggaggctttaacaaaggccaagaccaaggacctccagaacgtgtagtcttattaggagagttcctgcatccctgtgaagatgacatagtttgtaaatgtaccacagatgaaaataaggtgccttatttcaatgctcctgtttacttagaaaacaaagaacaaattggaaaagtggatgaaatatttggacaactcagagatttttatttttcagttaagttgtcagaaaacatgaaggcttcatcctttaaaaaactacagaagttttatatagacccatataagctgctgccactgcagaggtttttacctcgacctccaggtgagaaaggacctccaagaggtggtggcaggggaggccgaggaggaggaagaggaggaggtggcagaggtggtggcagaggcggtggttttagaggtggaagaggaggtggaggtgggggcttcagaggaggaagaggtggtggtttcagagggagaggacattaagtgaaacagttgacagacatcaccagttgacttctgcattaacctgcatgatctgtttctactatggattggaaacttgtttcttgaacaagtcttgaagatcttggtcattttatgacaatggatctaaaatgtcagcatcatgcaaagtgcaacggaatagtgaattttgctctaaaagagcatgaacaagtctttctaatgttttgtacagtgcctggcactctgtgggtgctcaataaatggataggagttttcatttgaagcatatttgaatttttaaaataaagtgttttattcccttaaaaaaaaaaaaaaa

SEQ ID NO: 2145 - DNA, 3754 bp, Homo sapiens
gacgtttcgcggcgtgggcggggccagcacgcaggttgcatattttaggaagtgaggaggaggcgcgggctggagctgcggcggggtctggggcgcagagcagcggcgggaggaggcggacacgtggcaacagcggtagcagcccgggcggcggcagcaacagcggcggcggcatcggcccgagccgccggccgccctcccaccctcccgccccgcggcagccctagctccctccacttggctcccctggtcccgctcgctcggccgggagctgctctgtgcttttctctctgattctccagcgacaggacccggcgccgggcactgagcaccgccaccatggggaagggggttggacgtgataagtatgagcctgcagctgtttcagaacaaggtgataaaaagggcaaaaagggcaaaaaagacagggacatggatgaactgaagaaagaagtttctatggatgatcataaacttagccttgatgaacttcatcgtaaatatggaacagacttgagccggggattaacatctgctcgtgcagctgagatcctggcgcgagatggtcccaacgccctcactccccctcccactactcctgaatggatcaagttttgtcggcagctctttggggggttctcaatgttactgtggattggagcgattctttgtttcttggcttatagcatccaagctgctacagaagaggaacctcaaaacgataatctgtacctgggtgtggtgctatcagccgttgtaatcataactggttgcttctcctactatcaagaagctaaaagttcaaagatcatggaatccttcaaaaacatggtccctcagcaagcccttgtgattcgaaatggtgagaaaatgagcataaatgcggaggaagttgtggttggggatctggtggaagtaaaaggaggagaccgaattcctgctgacctcagaatcatatctgcaaatggctgcaaggtggataactcctcgctcactggtgaatcagaaccccagactaggtctccagatttcacaaatgaaaaccccctggagacgaggaacattgccttcttttcaaccaattgtgttgaaggcaccgcacgtggtattgttgtctacactggggatcgcactgtgatgggaagaattgccacacttgcttctgggctggaaggaggccagacccccattgctgcagaaattgaacattttatccacatcatcacgggtgtggctgtgttcctgggtgtgtctttcttcatcctttctctcatccttgagtacacctggcttgaggctgtcatcttcctcatcggtatcatcgtagccaatgtgccggaaggtttgctggccactgtcacggtctgtctgacacttactgccaaacgcatggcaaggaaaaactgcttagtgaagaacttagaagctgtggagaccttggggtccacgtccaccatctgctctgataaaactggaactctgactcagaaccggatgacagtggcccacatgtggtttgacaatcaaatccatgaagctgatacgacagagaatcagagtggtgtctcttttgacaagacttcagctacctggcttgctctgtccagaattgcaggtctttgtaacagggcagtgtttcaggctaaccaggaaaacctacctattcttaagcgggcagttgcaggagatgcctctgagtcagcactcttaaagtgcatagagctgtgctgtggttccgtgaaggagatgagagaaagatacgccaaaatcgtcgagatacccttcaactccaccaacaagtaccagttgtctattcataagaaccccaacacatcggagccccaacacctgttggtgatgaagggcgccccagaaaggatcctagaccgttgcagctctatcctcctccacggcaaggagcagcccctggatgaggagctgaaagacgcctttcagaacgcctatttggagctggggggcctcggagaacgagtcctaggtttctgccacctctttctgccagatgaacagtttcctgaagggttccagtttgacactgacgatgtgaatttccctatcgataatctgtgctttgttgggctcatctccatgattgaccctccacgggcggccgttcctgatgccgtgggcaaatgtcgaagtgctggaattaaggtcatcatggtcacaggagaccatccaatcacagctaaagctattgccaaaggtgtgggcatcatctcagaaggcaatgagaccgtggaagacattgctgcccgcctcaacatcccagtcagccaggtgaaccccagggatgccaaggcctgcgtagtacacggcagtgatctaaaggacatgacctccgagcagctggatgacattttgaagtaccacactgagatagtgtttgccaggacctcccctcagcagaagctcatcattgtggaaggctgccaaagacagggtgctatcgtggctgtgactggtgacggtgtgaatgactctccagctttgaagaaagcagacattggggttgctatggggattgctggctcagatgtgtccaagcaagctgctgacatgattcttctggatgacaactttgcctcaattgtgactggagtagaggaaggtcgtctgatctttgataacttgaagaaatccattgcttataccttaaccagtaacattcccgagatcaccccgttcctgatatttattattgcaaacattccactaccactggggactgtcaccatcctctgcattgacttgggcactgacatggttcctgccatctccctggcttatgagcaggctgagagtgacatcatgaagagacagcccagaaatcccaaaacagacaaacttgtgaatgagcggctgatcagcatggcctatgggcagattggaatgatccaggccctgggaggcttctttacttactttgtgattctggctgagaacggcttcctcccaattcacctgttgggcctccgagtggactgggatgaccgctggatcaacgatgtggaagacagctacgggcagcagtggacctatgagcagaggaaaatcgtggagttcacctgccacacagccttcttcgtcagtatcgtggtggtgcagtgggccgacttggtcatctgtaagaccaggaggaattcggtcttccagcaggggatgaagaacaagatcttgatatttggcctctttgaagagacagccctggctgctttcctttcctactgccctggaatgggtgttgctcttaggatgtatcccctcaaacctacctggtggttctgtgccttcccctactctcttctcatcttcgtatatgacgaagtcagaaaactcatcatcaggcgacgccctggcggctgggtggagaaggaaacctactattagccccccgtcctgcacgccgtggagcatcaggccacacactctgcatccgacacccaccccctctttgtgtacttcagtcttggagtttggaactctaccctggtaggaaagcaccgcagcatgtggggaagcaagacgtcctggaatgaagcatgtagctctatggggggaggggggagggctgcctgaaaaccatccatctgtggaaatgacagcggggaaggtttttatgtgcctttttgtttttgtaaaaaaggaacacccggaaagactgaaagaatacattttatatctggatttttacaaataaagatggctattataatggaaaaaaaaaaaaaaa

SEQ ID NO: 2146 - DNA, 651 bp, Homo sapiens; identical to SEQ ID NO: 60

SEQ ID NO: 2147 - DNA, 191 bp, Homo sapiens
gttcagtttggtataaccagaaaggacagcttccagaatatctcagcatacatacctagtgatgtaggcatctacttctgtgctggtccttaatgctggtggtactagctatggaaagctgacatttggacaagggaccatcttgactgtccatccaaatatccagaaccctgaccctgccgtgtaccagc

SEQ ID NO: 2148 - DNA, 3209 bp, Homo sapiens; identical to SEQ ID NO: 1415

SEQ ID NO: 2149 - DNA, 1066 bp, Homo sapiens
cccaaggacctgttgtgtgcccagcttggaagacagtggccactcacatccaggtctctgcctggctatttgctccatgaacccatctcagatgcccctgcccccagggagccaggtgacagggtgaggtcaagtgacaagcagtaggtgtgggagaggtttggtggggtcaggcccacatgggcccagccatccactccccttccatctggagttgggggagtctgagctgctcctggccaccccatctgccccaccccatcttttcctggccaccccagctcccaccccatcttctcctggccaccccatctcccaccccatcttctcttgacaccccatctcccaccccatcttctcctggccaccccatctcccaccccatcttctcctggccaccccatcttctcctggccaccccatctcccccaccccatcttctcctggacacccccatctcccaccccatcttttgctacagccagggttagctcagcaggtgaaaaccccgagggtgggtgaaacccctctggggctcagacatgcaaaccttgggcatctctctgtcccagctggccccgccagccggtaggaagtttcccctgagttctcagttttttcttctgaaaaatgaggggttgtatgcaaggttctcctcctggcctgtggtccccagagaagggcaggaaggaaccttagataattctcatatgcatttaacagacgaggaaactgagacccagagccgtcacatcaatacctcatttgatcttcataagagcacctggaggaggggggtggggtgtttgtgtttgtttaaatttttttttgtgaaaaaaatgaagataggcattttgtagacaatctggaagttctggaccggaatccatgatgtagtcagggaagaaatgacccgtgtccagtaaccccaggcctcgagtgtgtggtgtatttttctacataattgtaatcattctatacatacaaattcatgtcttgaccatcatattaatatttggtaagtttctctctctttagagactccacaataaagttttcaacatgg

SEQ ID NO: 2150 - DNA, 397 bp, Homo sapiens
accacgccctccacgtgttccactgcctcttctcttctcgcttgggaactccagtctcacctcggcttgcaatggaccccaactgctcctgcgaggctggtggctcctgcgcctgcgccggctcctgcaagtgcaaaaagtgcaaatgcacctcctgcaagaagagctgctgctcctgttgccccctgggctgtgccaagtgtgcccagggctgcatctgcaaaggggcgtcagagaagtgcagctgctgtgcctgatgtcgggacagccctgctgtcagatgaaaacagaatgacacgtaaaatccaggattttttttttctacaactccgactcatttgctacattcctttttttctgtgaaatatgtgaataataattaaacacttagacttga

SEQ ID NO: 2151 - DNA, 6046 bp, Homo sapiens; identical to SEQ ID NO: 2095

SEQ ID NO: 2152 - DNA, 9725 bp, Homo sapiens; identical to SEQ ID NO: 631

SEQ ID NO: 2153 - DNA, 1497 bp, Homo sapiens; identical to SEQ ID NO: 331

SEQ ID NO: 2154 - DNA, 6492 bp, Homo sapiens
tttctgtgaagcagaagtctgggaatcgatctggaaatcctcctaatttttactccctctccccgcgactcctgattcattgggaagtttcaaatcagctataactggagagtgctgaagattgatgggatcgttgccttatgcatttgttttggttttacaaaaaggaaacttgacagaggatcatgctgtacttaaaaaatacaacatcacagaggaagtagactgatattaacaatacttactaataataacgtgcctcatgaaataaagatccgaaaggaattggaataaaaatttcctgcatctcatgccaagggggaaacaccagaatcaagtgttccgcgtgattgaagacaccccctcgtccaagaatgcaaagcacatccaataaaatagctggattataactcctcttctttctctgggggccgtggggtgggagctggggcgagaggtgccgttggcccccgttgcttttcctctgggaaggatggcgcacgctgggagaacagggtacgataaccgggagatagtgatgaagtacatccattataagctgtcgcagaggggctacgagtgggatgcgggagatgtgggcgccgcgcccccgggggccgcccccgcaccgggcatcttctcctcccagcccgggcacacgccccatccagccgcatcccgggacccggtcgccaggacctcgccgctgcagaccccggctgcccccggcgccgccgcggggcctgcgctcagcccggtgccacctgtggtccacctgaccctccgccaggccggcgacgacttctcccgccgctaccgccgcgacttcgccgagatgtccagccagctgcacctgacgcccttcaccgcgcggggacgctttgccacggtggtggaggagctcttcagggacggggtgaactgggggaggattgtggccttctttgagttcggtggggtcatgtgtgtggagagcgtcaaccgggagatgtcgcccctggtggacaacatcgccctgtggatgactgagtacctgaaccggcacctgcacacctggatccaggataacggaggctgggatgcctttgtggaactgtacggccccagcatgcggcctctgtttgatttctcctggctgtctctgaagactctgctcagtttggccctggtgggagcttgcatcaccctgggtgcctatctgggccacaagtgaagtcaacatgcctgccccaaacaaatatgcaaaaggttcactaaagcagtagaaataatatgcattgtcagtgatgtaccatgaaacaaagctgcaggctgtttaagaaaaaataacacacatataaacatcacacacacagacagacacacacacacacaacaattaacagtcttcaggcaaaacgtcgaatcagctatttactgccaaagggaaatatcatttattttttacattattaagaaaaaaagatttatttatttaagacagtcccatcaaaactcctgtctttggaaatccgaccactaattgccaagcaccgcttcgtgtggctccacctggatgttctgtgcctgtaaacatagattcgctttccatgttgttggccggatcaccatctgaagagcagacggatggaaaaaggacctgatcattggggaagctggctttctggctgctggaggctggggagaaggtgttcattcacttgcatttctttgccctgggggctgtgatattaacagagggagggttcctgtggggggaagtccatgcctccctggcctgaagaagagactctttgcatatgactcacatgatgcatacctggtgggaggaaaagagttgggaacttcagatggacctagtacccactgagatttccacgccgaaggacagcgatgggaaaaatgcccttaaatcataggaaagtatttttttaagctaccaattgtgccgagaaaagcattttagcaatttatacaatatcatccagtaccttaagccctgattgtgtatattcatatattttggatacgcaccccccaactcccaatactggctctgtctgagtaagaaacagaatcctctggaacttgaggaagtgaacatttcggtgacttccgcatcaggaaggctagagttacccagagcatcaggccgccacaagtgcctgcttttaggagaccgaagtccgcagaacctgcctgtgtcccagcttggaggcctggtcctggaactgagccggggccctcactggcctcctccagggatgatcaacagggcagtgtggtctccgaatgtctggaagctgatggagctcagaattccactgtcaagaaagagcagtagaggggtgtggctgggcctgtcaccctggggccctccaggtaggcccgttttcacgtggagcatgggagccacgacccttcttaagacatgtatcactgtagagggaaggaacagaggccctgggcccttcctatcagaaggacatggtgaaggctgggaacgtgaggagaggcaatggccacggcccattttggctgtagcacatggcacgttggctgtgtggccttggcccacctgtgagtttaaagcaaggctttaaatgactttggagagggtcacaaatcctaaaagaagcattgaagtgaggtgtcatggattaattgacccctgtctatggaattacatgtaaaacattatcttgtcactgtagtttggttttatttgaaaacctgacaaaaaaaaagttccaggtgtggaatatgggggttatctgtacatcctggggcattaaaaaaaaaatcaatggtggggaactataaagaagtaacaaaagaagtgacatcttcagcaaataaactaggaaatttttttttcttccagtttagaatcagccttgaaacattgatggaataactctgtggcattattgcattatataccatttatctgtattaactttggaatgtactctgttcaatgtttaatgctgtggttgatatttcgaaagctgctttaaaaaaatacatgcatctcagcgtttttttgtttttaattgtatttagttatggcctatacactatttgtgagcaaaggtgatcgttttctgtttgagatttttatctcttgattcttcaaaagcattctgagaaggtgagataagccctgagtctcagctacctaagaaaaacctggatgtcactggccactgaggagctttgtttcaaccaagtcatgtgcatttccacgtcaacagaattgtttattgtgacagttatatctgttgtccctttgaccttgtttcttgaaggtttcctcgtccctgggcaattccgcatttaattcatggtattcaggattacatgcatgtttggttaaacccatgagattcattcagttaaaaatccagatggcaaatgaccagcagattcaaatctatggtggtttgacctttagagagttgctttacgtggcctgtttcaacacagacccacccagagccctcctgccctccttccgcgggggctttctcatggctgtccttcagggtcttcctgaaatgcagtggtgcttacgctccaccaagaaagcaggaaacctgtggtatgaagccagacctccccggcgggcctcagggaacagaatgatcagacctttgaatgattctaatttttaagcaaaatattattttatgaaaggtttacattgtcaaagtgatgaatatggaatatccaatcctgtgctgctatcctgccaaaatcattttaatggagtcagtttgcagtatgctccacgtggtaagatcctccaagctgctttagaagtaacaatgaagaacgtggacgtttttaatataaagcctgttttgtcttttgttgttgttcaaacgggattcacagagtatttgaaaaatgtatatatattaagaggtcacgggggctaattgctggctggctgccttttgctgtggggttttgttacctggttttaataacagtaaatgtgcccagcctcttggccccagaactgtacagtattgtggctgcacttgctctaagagtagttgatgttgcattttccttattgttaaaaacatgttagaagcaatgaatgtatataaaagcctcaactagtcatttttttctcctcttcttttttttcattatatctaattattttgcagttgggcaacagagaaccatccctattttgtattgaagagggattcacatctgcatcttaactgctctttatgaatgaaaaaacagtcctctgtatgtactcctctttacactggccagggtcagagttaaatagagtatatgcactttccaaattggggacaagggctctaaaaaaagccccaaaaggagaagaacatctgagaacctcctcggccctcccagtccctcgctgcacaaatactccgcaagagaggccagaatgacagctgacagggtctatggccatcgggtcgtctccgaagatttggcaggggcagaaaactctggcaggcttaagatttggaataaagtcacagaattaaggaagcacctcaatttagttcaaacaagacgccaacattctctccacagctcacttacctctctgtgttcagatgtggccttccatttatatgtgatctttgttttattagtaaatgcttatcatctaaagatgtagctctggcccagtgggaaaaattaggaagtgattataaatcgagaggagttataataatcaagattaaatgtaaataatcagggcaatcccaacacatgtctagctttcacctccaggatctattgagtgaacagaattgcaaatagtctctatttgtaattgaacttatcctaaaacaaatagtttataaatgtgaacttaaactctaattaattccaactgtacttttaaggcagtggctgtttttagactttcttatcacttatagttagtaatgtacacctactctatcagagaaaaacaggaaaggctcgaaatacaagccattctaaggaaattagggagtcagttgaaattctattctgatcttattctgtggtgtcttttgcagcccagacaaatgtggttacacactttttaagaaatacaattctacattgtcaagcttatgaaggttccaatcagatctttattgttattcaatttggatctttcagggattttttttttaaattattatgggacaaaggacatttgttggaggggtgggagggaggaagaatttttaaatgtaaaacattcccaagtttggatcagggagttggaagttttcagaataaccagaactaagggtatgaaggacctgtattggggtcgatgtgatgcctctgcgaagaaccttgtgtgacaaatgagaaacattttgaagtttgtggtacgacctttagattccagagacatcagcatggctcaaagtgcagctccgtttggcagtgcaatggtataaatttcaagctggatatgtctaatgggtatttaaacaataaatgtgcagttttaactaacaggatatttaatgacaaccttctggttggtagggacatctgtttctaaatgtttattatgtacaatacagaaaaaaattttataaaattaagcaatgtgaaactgaattggagagtgataatacaagtcctttagtcttacccagtgaatcattctgttccatgtctttggacaaccatgaccttggacaatcatgaaatatgcatctcactggatgcaaagaaaatcagatggagcatgaatggtactgtaccggttcatctggactgccccagaaaaataacttcaagcaaacatcctatcaacaacaaggttgttctgcataccaagctgagcacagaagatgggaacactggtggaggatggaaaggctcgctcaatcaagaaaattctgagactattaataaataagactgtagtgtagatactgagtaaatccatgcacctaaaccttttggaaaatctgccgtgggccctccagatagctcatttcattaagtttttccctccaaggtagaatttgcaagagtgacagtggattgcatttcttttggggaagctttcttttggtggttttgtttattataccttcttaagttttcaaccaaggtttgcttttgttttgagttactggggttatttttgttttaaataaaaataagtgtacaataagtgtttttgtattgaaagcttttgttatcaagattttcatacttttaccttccatggctctttttaagattgatacttttaagaggtggctgatattctgcaacactgtacacataaaaaatacggtaaggatactttacatggttaaggtaaagtaagtctccagttggccaccattagctataatggcactttgtttgtgttgttggaaaaagtcacattgccattaaactttccttgtctgtctagttaatattgtgaagaaaaataaagtacagtgtgagatactg

SEQ ID NO: 2155 - DNA, 2551 bp, Homo sapiens
actgcgcactgaggtggccacagtcgctaagaaggttgccatcgcgacgcggctgctcgagggtttcgcttccgggttaggcggccgcagaagcgtagaccgagtagcttgagcgcctcttccggttaccttttcccagcgccagaggcgcctagggttggggtcctcgctcaggcacagagacccgacaccgagcggcggcttccccgggatcgagggacgcgcacgccagaggagacgaaaggaacccgggtcggaccagatcggaaccactgaccattgcccatggcggccctaggccctagcagccagaatgtcactgaatacgtcgttcgagttcctaagaatacaaccaaaaaatataacatcatggcttttaatgcagccgacaaagtcaactttgctacgtggaatcaggctcggctggagcgggacttgagcaacaagaaaatctaccaagaggaggagatgcccgaatcgggcgcgggcagtgagttcaaccgcaagcttcgggaggaggctcggaggaagaagtacggcatcgtcctcaaggagttccggcccgaggaccagccctggctgctccgggtcaacggcaaatcaggcaggaagttcaagggcatcaagaagggaggcgtaacagagaacacgtcctactacatcttcacccagtgccccgacggggccttcgaggccttccccgtgcacaactggtacaatttcacaccgctggcccggcatcgcacgctcactgccgaggaggccgaggaggagtgggagaggaggaacaaggtgctgaaccacttcagcatcatgcagcagcggcggctcaaggatcaggaccaggacgaggatgaggaggagaaggagaaacgtggccgcaggaaggcgagcgagctgcgcatccacgacctggaggacgacctggagatgtcgtccgatgccagtgatgccagtggtgaggaggggggcagagtccccaaggccaagaagaaggcgccgctggccaagggcggcaggaaaaagaagaagaagaagggttcagacgacgaggccttcgaggacagcgatgatggggacttcgagggccaagaggtggactacatgtcagacggctccagtagctcccaagaagagcctgagagcaaggccaaggcgccgcagcaggaggaggggcccaagggtgtcgatgagcagagcgacagtagtgaggagagtgaggaggagaagccgcctgaggaggacaaggaggaggaggaggagaagaaggcacccaccccgcaggagaagaagcgcaggaaagacagcagcgaggagtcggacagctcagaggagagcgacattgacagcgaggcctcctcagccctcttcatggcgaagaagaagacgccacccaagagagagcggaagccgtcgggagggagctcaaggggcaacagccgcccaggcacgcccagcgcagagggtggcagcacctcctccaccctgcgggcggctgccagcaaactcgagcaagggaagcgggtgagcgagatgcctgcagccaagcggttgcggctggacacgggaccccagagcctgtctgggaagtcgacaccccagccaccatcaggcaagacaacacccaacagcggcgacgtgcaggtgactgaggatgccgtgcgccgctacctgacacggaagcccatgaccactaaggacctgctgaaaaagttccagaccaagaagacagggctgagcagcgagcagacagtgaacgtgttggcccagatcctcaagcgactcaaccccgagcgcaagatgatcaacgacaaaatgcacttctccctcaaggagtgaggcttggtccaatacatggctctgccccccagaacttaaggctctcactgccccttcgccatcctagagtgaggctctgtccaatacatggctctgccctccagaacttcaggctctcagtgacccttcgacatcctgcttgctccctgactcccagggccccgtagttagcaattctggaaaagttaagccatctcctcctctggcccttccttctggaatcttcagatgcctgttaggccttcttattgtcctcctcctcctggctcggcctccctcacactgaccaagggcctgtgctgcccactgggtaacttctacagttctcccttccacttccctaagtctctcttcagctgtgacttatccaccacatagcccagtaagtcttcagttttggctgggcatgatggtgagcgcctgcagtcccagctacttgggaggctaagcccagttcaaggctgcagtgaactatgatggtgccactgcattccagcctgggtgacagaatgaaatcctggcacaaaaaaaaaaaaaaagtagccaggcatggtggcgggagcctgttgtcccagctgttccgtaggctgaggcacgagattcacttgaacctgggaggtggaggttgctgtgagctgacaccacgccactgcactccagcctgggtgacagtgagactctgtctcaataaataaaaaataataataaattg

SEQ ID NO: 2156 - DNA, 6046 bp, Homo sapiens; identical to SEQ ID NO: 2095

SEQ ID NO: 2157 - DNA, 5400 bp, Homo sapiens
gatgacgtaacaaacgcgcgcgacgattcgaggtgctctgtggccgcgagtgcatcttccacgaacctaattcatctctccagcaaaggacacatctctccagcaaaggacacctctctccagcaaaggacacctgcagagatgtccccagtccttcacttctatgttcgtccctctggccatgagggggcagcccctggacacactcggaggaaactgcaagggaaactgccagagctgcagggcgtcgagactgaactgtgctacaacgtgaactggacagctgaggccctccccagtgctgaggagacaaagaagctgatgtggctgtttggttgccccttactgctggatgatgttgctcgggagtcctggctccttcctggctccaatgacctgctgctggaggtcgggcccaggctgaacttctccaccccaacatccaccaacatcgtgtcagtgtgccgcgccactgggctggggcctgtggatcgtgtggagaccacccggcgctaccggctctcgtttgcccaccccccgtcagctgaggtggaagccattgctctggctaccctgcacgaccggatgacagagcagcacttcccccatcccatccagagtttctcccctgagagcatgccggaacccctcaatggccctatcaatatactgggtgagggccggcttgcgctggagaaggccaaccaggagcttggtctggctttagactcttgggacctagacttctacaccaagcgcttccaggagctacagcggaacccgagcactgtggaggcctttgacttggcgcagtccaatagcgagcacagccgacactggttcttcaagggccagctccacgtggatgggcagaagctggtgcactcactgtttgagtccatcatgagcacccaggaatcctcgaaccccaacaacgtcctcaaattctgtgataacagcagtgcaatccagggaaaggaagtccgattcctacggcctgaggaccccacacggccaagccgcttccagcaacagcaagggctgagacatgttgtcttcacagcagagactcacaactttcccacaggagtatgcccctttagtggtgcaaccactggcacagggggccggattcgagatgtccagtgcacaggccgcggggcccacgtggtggctggcactgccggctattgctttggaaatctgcatattccaggttacaatctgccctgggaggatccaagcttccagtatcctgggaattttgcccggcccctggaggttgccattgaagccagtaatggagcttctgactatggcaacaagtttggggaaccagtgctggctggcttcgcccgctccttgggcctccagctcccagacggccagcggcgtgagtggatcaagcccatcatgtttagtgggggcattgggtccatggaagctgaccacataagcaaggaggccccagagccaggcatggaagttgtaaaggttggaggtcccgtctacaggattggagttggaggtggagctgcttcatctgtgcaggtgcagggagataacaccagtgacctggactttggggctgtgcagcgaggagacccggagatggaacagaagatgaaccgtgtgatcagggcttgtgtggaggcccccaagggaaaccccatctgcagccttcatgatcagggcgctggtggcaatggcaatgtcctaaaagagctgagtgacccagctggagccatcatttacaccagccgcttccagcttggggacccaaccctgaatgccctggaaatctggggggctgagtaccaggaatcaaatgctcttctgctgaggtcccccaaccgggacttcctgactcatgtcagtgcccgtgaacgttgcccggcttgcttcgtgggcaccatcactggagaccggagaatagtgctggtggacgatcgggagtgtcctgtcagaagaaatggccagggggatgcccccccgacacccctgccaacccctgtggacctggagctcgaatgggtgctgggcaagatgcctcggaaggagttcttcctgcagaggaagccccccatgctgcagcctctggccttgcccccagggctgagcgtgcaccaggctctggagagggttctgaggctgcccgccgtggccagcaagcgctacctcaccaataaggtggaccgctctgtgggaggcctggtggcccagcagcagtgcgtggggcccctgcaaactcctctggcagatgtagcggttgtggcactgagccatgaggagctcataggggctgccacagccttgggagaacagccagtcaagagcctgctggacccaaaagtcgccgcccggctggccgtggccgaagccctcaccaacctggtgtttgctctggtcactgacctccgggatgtgaagtgtagcgggaactggatgtgggcagccaagctcccaggggagggcgcagctttggcggatgcctgtgaggctatggtggcagtgatggcagccctgggtgtggcagtggatggtggcaaggactccctcagcatggctgctcgggttggcactgagaccgtgcgggctcctgggtcactggtcatctcagcctatgccgtctgcccagacatcacagccactgtgaccccagacctcaagcatcctgaagggagaggccatctgctctatgtggctctgagccctgggcagcaccggctcgggggcacagctctggcccagtgcttctcccagcttggggaacaccctccagacctggaccttcctgagaacttggtgcgggccttcagcatcactcaggggctgctgaaagaccgcctcctctgctcaggccacgatgtcagtgacggaggcctcgtcacatgcctgctggagatggcctttgctggaaattgcgggctacaggtggatgtgcctgtccccagggttgatgtcctgtctgtgctgttcgctgaggagccaggcctcgtgctggaggtgcaggagccagacctggcccaggtgctgaagcgttaccgggatgctggcctccattgcctggagctgggccacacaggcgaggccgggccccacgccatggtccgggtgtcagtgaacggggctgtggttctggaggagcctgttggggagctgcgagccctctgggaggagacgagtttccagctggaccggctacaggcagagcctcgctgtgtggcagaggaggaacggggcctgagggagcggatggggcccagctattgcctgccccccacctttcccaaagcctccgtgccccgtgagcctggtggtcccagcccccgagtcgccatcttgcgagaggagggcagtaatggagaccgggagatggccgatgccttccacttagctgggtttgaggtatgggacgtgaccatgcaggacctctgctctggggcaattgggctggacactttccgtggcgtggccttcgtgggcggcttcagctatgcagatgtcctgggctctgccaaagggtgggcagctgctgtgacctttcatcccagggctggggctgagctgaggcgcttccggaagcggccagacaccttcagcctgggcgtgtgtaatggctgtcaactgctggctctgctcggctgggtgggaggcgaccccaatgaggatgctgcagagatgggccctgactcccagccagcccggccaggccttctgctacgccacaacctgtctgggcgctacgagtctcgctgggccagcgtgcgtgtggggcctgggccagccctgatgctgcgagggatggagggcgccgtgctgcccgtgtggagtgcgcacggggaaggttacgtagcattttcttctccggaactccaagctcagattgaggccaggggcttggctccactgcactgggctgatgatgacgggaaccccacagagcagtaccctctgaatcccaatgggtccccagggggcgtggctggcatctgctcctgtgatggccgccacctggctgtcatgcctcaccctgagcgggccgttaggccttggcagtgggcatggcgaccccctccatttgatactctgaccacctccccctggctccagctctttatcaatgcccgaaactggaccctggaagggagctgctgactggccacaggggctcacctgggccccatggcttttcacctaagtgggtcctgccccctcccccatgaccttcaggagcaccccatattatttccaaaaatatcttggacagacaaggaccaaaatgccaaaatctcagcggactcgataatctgcctgctgatgttccttctgtggctgtgtctattttcagttctgctctaacatggcatgccctttctcagcccaggaaacagcatgtggttcagagaaaagagcgacaaggaaaagttaggactcctgaggtccgaacaggggcttctgttgcccacttcacaacacccagtgatcaccggtgtgcaattgcctccttggctctgagggatgttttgcgctcccttttctcatcattggggttagcgggtgcagacaaattcagcaatagtatgcagatcagcccctcaccacctcattgttctcatctggaactgaaactttctggatttctcttgaagtgctacactgcactgaatgtaaggaattgttgcttgtggaagtttctcagcgtttctggctgtcttagggctggcctcagaacccagcattcctgttatttgcttctaaattagcagctctctttttttttttttttttgaggcagtctcactctgtcacccaggctggagtacaatggcgtgatctcggcccactgcaacctctgcctcctgggttcaagcaattttcctgcctcagcctcccgagtagctgggagtacaggcacacaccaccacacccagctaatttttgtatttttagtagagatagggtttcaccatgtctcccaggctggtctcaaactcctaacctcaagtgattcgcctgcctcggcctcccaaagtgctgggattacaggtgggagccactacagctggcccagcagctctgtttctgatagaggtggttggggctctcatccctagatcctaaccctttagtatgctggaattctactcttcacttactgcattgactgttgttgattagttattattgcaaagcactgtcaccggcctcagggagtttatgtgtaatagaattaaaaataatagctgtgtataacacttagctcaagccacgcatgtgtgaggcatttggtatgtatctgaattaattctcactaaaattcagcaaaggacttgatagcccctccccgccttttcaataaaggatgaatgaaggttgactgcaaaaaaaaaaaaaaaa

SEQ ID NO: 2158 - DNA, 576 bp, Homo sapiens
atggaaatgagggtccccgctcagctcctggggctcctgctgctctggctccgaggtgccagatgtgacatccaggtgacccagtctccatcttccctgtctgcgtctgtaggagacagagtcaccatcacctgccgggcaagtcagggcattagcaatgggttatcctggtatcagcagaaaccagggcaagcccctacgctcctgatctatgctgcatccagtttgcagtcgggggtcccatctcggttcagtggcagtggatctgggacagatttcactctcaccatcagcagcctgcagcctgaagatgttgcaacttattactgtctacaggattatactaccccattcacagtgttacaagccataacaaaaaccccccagagaagcagatgtgtgagtctgcactgtcctagctactcctcctggtgcctccatctgctgagaacatttcccaaattgcatccacactttgaagtttctgtagaaagtgacatgaagcctcctctataccttaactatctttccttcacggcatccccagcggcacagacagggcaaaccctctcctga

SEQ ID NO: 2159 - DNA, 2861 bp, Homo sapiens
gagaggttacttccggggcggcaccgagaagctgaaacggaagtggcgtacggcatgcgccggtggcgtgatggagcggcagcagcagcagcaacagcaactgcgaaacctgcgtgacttcctgttggtctacaatcggatgacagaactctgcttccagcgctgtgtgcccagcttgcaccaccgagctctggacgctgaggaggaggcctgtctgcacagctgtgctgggaagctgatccattccaaccaccgcctcatggccgcttacgtgcagctcatgcctgccctggtacagcgccgcatcgcagactacgaggctgcctcggctgtgccaggcgttgctgctgaacagcctggggtctctccatcaggcagctagccatacccaaccccaggaaggaaggccttggatggaccctcagattgaaggacccggtggaccttggggttggtgaatcctaaacagagagaattcgaggttgcctgaaagctgggtgtccttgctccttttcctggagccaatatacccagtttttactcagtttgatttatattctgggcaaggaagctttgcctactttattggcacaatccgttgttctgtcgtttagtgcatatctgctggcttcagccctggcagctgagaaattgttttctatatgtagaaggaaaacctgagcatttgcaggcatctggttaaagcagggtctgtgtgtacaattttaaaacgggtaatatgtcatgctcttagttcatcttcacaacaaaactatgagtaagcggtattagcctcacttaacagatgaggaagcaagattccagaaagtaccagaaggtcattttatacaacaggagattggttcctgcccagatgacagaaaatgggagctctgtctagttgtccttaagtctgactgacttcagtggctcataaccgtgagccaagtatttgttggttcataactgttgttttgtgaactatgtcttacatgtctagagttctgctggatctagggaaaggaggagctatcgaagtacaacggatcaaaaaaccacagggcttttgggcactgcctccttgggaagttagtggccacagaagagagatgaaacctgtaagaagtctggagtcttttggaacttcagccatttccccaggttgttactttcttagtatgtacagtcttctcaggatgagcagtaaaacctttgaacaaaggtctgtgtggttgtcttcacgggcaatcaggaagggagagagctggggaccatattctgcaatgcagccaaatccgaggaagagaaactgaagggagaagtagatggcaatggttatgataaaaagggataaaactaaatcttcgggacttctttaatgctacgttaatgtttcactgctcgtctagaaactcctaaatccagctttctatcatctgccccacattggtcccattgagtacattctgtgatttctaattccagcctctccattcttttctcattattgcctcccccgccccccaactttgtgtaatttacttctgtattcagcagcctggatagcatatcattccatcaccccattttcttgccaccattggccatctttttgtatcattccacttattctgtcttttccattccttcattcaaactgctagagaaaaacagttgtgtaatgaatgccactaaatattcaaggcctccaacctcagccaagtcctcacaccaacacgcagtcacaccaacacacacctttatgggttcctggtccatttccttctctaattaccatggcagttattttacacctctactgctgtccttaatcccataccccaccctcatcaggtgaccctgtttccttttttagagaaattgaagctcttagacattggtttccacagtaataattttaaaacttcttacaactacctacaaagcagatgttctatcctatctacagagcagaaaattgaaattctcaagtagcagacccggtattaaagtgcagatctgactttaaagtccatgttcattttacacagcaggctgcctcttaagatagtatttattgagcacacactttgtgtaggttctgattttggtagatgtcatgctttatattaatctttacaacaactataagtaagaggtattaacctcacttaacagatgaggaagcaagaatccagaatgtgccagaaggcacattctgcagatttcgtgcaaacatttatacacagcttcttttttttttttttgagacagagtctcgctctgtcacccaggctggagtgcagtggagcgatctaggctcactgcaacctccgccacccgggttcaagcagttctcctgcctcagcctctcgagtagctgggattacaggcatgcgccaccacgcccagctaattttgtttttgtattttaagtagagacggggtttcactgtattggtcaggctggtcttgaactcctgaccttgtgatccgcccgcctcggcctccaaaagtgctgggattacaggtgtgagccaccacggccggcctatacaaagtttcttattgagaaaagtggttccaatcatgttttttgccccctttagctgctatctcttgaacagaaaagtttgttaggaaggtaaaagttgctgactaggaccttacccacagggtggcactctgtccttgggaaatataaatgcaagtaaaacaggtttgaacttcttaacttccagaagataggaggatgggacctgtgatactgtgctgctggtgggaggacccttccacatcaacatttgtgtgtatccttgcaataaacttccattgtgaattaaaaaaaaaaaaaaaaaaaa

SEQ ID NO: 2160 - DNA, 380 bp, Homo sapiens
tttttttttttttttttttaaaaacaaatctaggtatttatttaacacttaaaagagtacttactctgtgccaggaactattctaagcactttgcatatattaattcatttaattctcacatcagctctctttgctctccaagtcaatacattttcatctagagctgggattctaagccagacttcattaaccacccacatacccccttaaaaccacaatgctagattacctctcaatgagtgtaggaaatggatgtgatgaaagacagaaaaaagcatgaggcctaaatgtgtgaatggcttgaggaatgaatgctctgactgaagaaagaatgcctgagatccgcacactccttccactggcctgtagaggcagcagc

SEQ ID NO: 2161 - DNA, 306 bp, Homo sapiens
tttgctacaaatcaggctttattgagtgcctactatgtgccaggctgggactaaaggcagtgaacaaaatagagttgctggcctggtataacttgtgttttatctttatctttgtttccagtatgcatttatctctgtctatccaaccaatcattcttccttcaagctttttattaaagccattaagagtaatatcaaagacttttgcaccaacttaataccatcttcctatccacccacacatccatccatcctccatccaccctcctacctactaatccctcctttcaggtgagccagctcttg

SEQ ID NO: 2162 - DNA, 488 bp, Homo sapiens
atcccaagttgtattactagttttggggagtttgcagacaattgaatattctataggctgtgttgcagctttagatggatcgacctgtcatgtttttgaggttatccaggctgtatatctctggagagaagggaatggcaaagagtgggagtctgagtcaagtttggttttttttttttaagagacaaggtctctgtaatccaggctgcagtacactggcatgaccatggctcactatagacttgggctcagcaatcttcctgcctcagcctcctgagtagctgggtttggttttccccagggccatatgtcagcttatttaccctcctcacttggtgtctcccagcctgccagcccatgctgttcatccagtatctgctgaatggtgattacctattaagtggaactaacacaaaattgcttatctaaaagcaattattggtgattatttccttgcagtggcccactagagggcgccattgttaagt

SEQ ID NO: 2163 - DNA, 3463 bp, Homo sapiens
ataaaccaaggctcttaccatagctgaactttaaaacttagactgtcttttctgtaaacgattctgaggcaaagggaaatgactagaagaggatgagtaaacaataacctgaaatgggaaactcgagggaagcacaggttttttttgttttgttttgtttggttcgttttttgttctttggggtttttttgagacagaatttcgctctcgttgcccaagttggagtgcaatggcgcgatcttggctcactgcaacctccgcctcccgggttcaagcgattctcctgcctcagcctcccaagtagctgtgattccaggcacgtgccaccacaccagctaattttttgtattttaatagaaacagggtttcaccgtgttagccaggctggtctcaaactgacctcagatgatccgcccgccttggcctcccaaagtgctgggattacagatgtgagccaccgcgcccggccagagcactgttttttttaatggccttgcactcttcttatggacctttgctgccctcagttgaccaaacatgacatcagaaacagatacatttgtgtgttttaaaaacagctcctaatactggaacaaaaatatttaactgtcttgacaatactcatgagtatctgcatggcgacttcagagttgagtttaatcaaagagtttattcttaggtcctagtagaagagctaacctcacactcatcccattctaaactatgtgattcaacactgattttacatcccacaaagtgaaatcttgatagttgggtgtaaaaaggagagtaatggagatttcagagtagttggggttgcttacttttcatttttaattctttaggttttgtaagttacacacttcaagcattatagatgatcctctttttactactgaactaatgaagcctttttcattgcattgttctgcatttatttctacagggagaaaactggttgtcctggatgtttgaaaagttggtcgttgtcatggtgtgttacttcatcctatctatcattaactccatggcacaaagttatgccaaacgaatccagcagcggttgaactcagaggagaaaactaaataagtagagaaagttttaaactgcagaaattggagtggatgggttctgccttaaattgggaggactccaagccgggaaggaaaattcccttttccaacctgtatcaatttttacaacttttttcctgaaagcagtttagtccatactttgcactgacatactttttccttctgtgctaaggtaaggtatccaccctcgatgcaatccaccttgtgttttcttagggtggaatgtgatgttcagcagcaaacttgcaacagactggccttctgtttgttactttcaaaaggcccacatgatacaattagagaattcccaccgcacaaaaaaagttcctaagtatgttaaatatgtcaagctttttaggcttgtcacaaatgattgctttgttttcctaagtcatcaaaatgtatataaattatctagattggataacagtcttgcatgtttatcatgttacaatttaatattccatcctgcccaacccttcctctcccatcctcaaaaaagggccattttatgatgcattgcacaccctctggggaaattgatctttaaattttgagacagtataaggaaaatctggttggtgtcttacaagtgagctgacaccattttttattctgtgtatttagaatgaagtcttgaaaaaaactttataaagacatctttaatcattccaaaattgtgtccgttttcttgagcgttttgattttttacttttagcttataccagctgaatggcagccttgcctaatccacctacaacaagaatttcttaagctttcttttatttgcatgagagagccactaccaaggcatgttttgttatgctgaaactgggctgctgcatactgctaaatggcacctctgggattggcctacctggggatttcttggtttgtgaaaacaggagaggagaaatatctcatacaagtgaaaggatactggagagagaaattacccatttctaaaaaaaaaccacactctgtcgtatctgtgttaatgttttctagcatgtactctggtttcaacagacacaaatttatatgttaacccagttttcttgccgttctgtaagtgttttattcttagtgtgatttttttccattgggatgtttttgattgaacttgttcattttgttttgcttgggaggaaaataaacaattttacttttttcctttaggagcattatgagcattatgtcagaatagaatagaattggggttcgatcttaacaggccagaaatgcctgggttttttttggtttgtttttgtttttgtttttttatcaaatcctgcctgactgtctgcttgttttgcctaccatcgtgacatctccatggctgtaccaccttgtcgggtagcttatcagactgatgttgactgttgaatctcatggcaacaccagtcgatgggctgtctgacattttggtatctttcatctgaccatccatatccaatgttctcatttaaacattacccagcatcattgtttataatcagaaactctggtccttctgtctggtggcacttagagtcttttgtgccataatgcagcagtatggagggaggattttatggagaaatggggatagtcttcatgaccacaaataaataaaggaaaactaagctgcattgtgggttttgaaaaggttattatacttcttaacaattctttttttcagggacttttctagctgtatgactgttacttgaccttctttgaaaagcattcccaaaatgctctattttagatagattaacattaaccaacataattttttttagatcgagtcagcataaatttctaagtcagcctctagtcgtggttcatctctttcacctgcattttatttggtgtttgtctgaagaaaggaaagaggaaagcaaatacgaattgtactatttgtaccaaatctttgggattcattggcaaataatttcagtgtggtgtattattaaatagaaaaaaaaattttgtttcctaggttgaaggtctaattgatacgtttgacttatgatgaccatttatgcactttcaaatgaatttgctttcaaaataaatgaagagcagctgtccttctttcctcttttaagtgttcagctgtggcatgctcagaggttcctgctggattccagctggagcggtgtgatacccttctttttcagctgttcgtgccttcctttcttgtgtccaccaaagtggagacaaatacatgatctcaaagatacacagtacctacttaattccagctgatgggagaccaaagaatttgcaagtggatggtttggtatcactgtaaataaaaagagggcctgggaattcttgcgattccatctctaaaaaaaaaaaaaaaaaaaaaaaaaaaaaa

SEQ ID NO: 2164 - DNA, 6046 bp, Homo sapiens; identical to SEQ ID NO: 2095

SEQ ID NO: 2165 - DNA, 3070 bp, Homo sapiens
ggcgccgtcttgatactttcagaaagaatgcattccctgtaaaaaaaaaaaaaaaatactgagagagggagagagagagagaagaagagagagagacggagggagagcgagacagagcgagcaacgcaatctgaccgagcaggtcgtacgccgccgcctcctcctcctctctgctcttcgctacccaggtgacccgaggagggactccgcctccgagcggctgaggaccccggtgcagaggagcctggctcgcagaattgcagagtcgtcgcccctttttacaacctggtcccgttttattctgccgtacccagtttttggatttttgtcttccccttcttctctttgctaaacgacccctccaagataatttttaaaaaaccttctcctttgctcacctttgcttcccagccttcccatccccccaccgaaagcaaatcattcaacgacccccgaccctccgacggcaggagccccccgacctcccaggcggaccgccctccctccccgcgcgcgggttccgggcccggcgagagggcgcgagcacagccgaggccatggaggtgacggcggaccagccgcgctgggtgagccaccaccaccccgccgtgctcaacgggcagcacccggacacgcaccacccgggcctcagccactcctacatggacgcggcgcagtacccgctgccggaggaggtggatgtgctttttaacatcgacggtcaaggcaaccacgtcccgccctactacggaaactcggtcagggccacggtgcagaggtaccctccgacccaccacgggagccaggtgtgccgcccgcctctgcttcatggatccctaccctggctggacggcggcaaagccctgggcagccaccacaccgcctccccctggaatctcagccccttctccaagacgtccatccaccacggctccccggggcccctctccgtctaccccccggcctcgtcctcctccttgtcggggggccacgccagcccgcacctcttcaccttcccgcccaccccgccgaaggacgtctccccggacccatcgctgtccaccccaggctcggccggctcggcccggcaggacgagaaagagtgcctcaagtaccaggtgcccctgcccgacagcatgaagctggagtcgtcccactcccgtggcagcatgaccgccctgggtggagcctcctcgtcgacccaccaccccatcaccacctacccgccctacgtgcccgagtacagctccggactcttcccccccagcagcctgctgggcggctcccccaccggcttcggatgcaagtccaggcccaaggcccggtccagcacagaaggcagggagtgtgtgaactgtggggcaacctcgaccccactgtggcggcgagatggcacgggacactacctgtgcaacgcctgcgggctctatcacaaaatgaacggacagaaccggcccctcattaagcccaagcgaaggctgtctgcagccaggagagcagggacgtcctgtgcgaactgtcagaccaccacaaccacactctggaggaggaatgccaatggggaccctgtctgcaatgcctgtgggctctactacaagcttcacaatattaacagacccctgactatgaagaaggaaggcatccagaccagaaaccgaaaaatgtctagcaaatccaaaaagtgcaaaaaagtgcatgactcactggaggacttccccaagaacagctcgtttaacccggccgccctctccagacacatgtcctccctgagccacatctcgcccttcagccactccagccacatgctgaccacgcccacgccgatgcacccgccatccagcctgtcctttggaccacaccacccctccagcatggtcaccgccatgggttagagccctgctcgatgctcacagggcccccagcgagagtccctgcagtccctttcgacttgcatttttgcaggagcagtatcatgaagcctaaacgcgatggatatatgtttttgaaggcagaaagcaaaattatgtttgccactttgcaaaggagctcactgtggtgtctgtgttccaaccactgaatctggaccccatctgtgaataagccattctgactcatatcccctatttaacagggtctctagtgctgtgaaaaaaaaaatgctgaacattgcatataacttatattgtaagaaatactgtacaatgactttattgcatctgggtagctgtaaggcatgaaggatgccaagaagtttaaggaatatgggagaaatagtgtggaaattaagaagaaactaggtctgatattcaaatggacaaactgccagttttgtttcctttcactggccacagttgtttgatgcattaaaagaaaataaaaaaaagaaaaaagagaaaagaaaaaaaaagaaaaaagttgtaggcgaatcatttgttcaaagctgttggcctctgcaaaggaaataccagttctgggcaatcagtgttaccgttcaccagttgccgttgagggtttcagagagcctttttctaggcctacatgctttgtgaacaagtccctgtaattgttgtttgtatgtataattcaaagcaccaaaataagaaaagatgtagatttatttcatcatattatacagaccgaactgttgtataaatttatttactgctagtcttaagaactgctttctttcgtttgtttgtttcaatattttccttctctctcaatttttggttgaataaactagattacattcagttggcctaaggtggttgtgctcggagggtttcttgtttcttttccattttgtttttggatgatatttattaaatagcttctaagagtccggcggcatctgtcttgtccctattcctgcagcctgtgctgagggtagcagtgtatgagctaccagcgtgcatgtcagcgaccctggcccgacaggccacgtcctgcaatcggcccggctgcctcttcgccctgtcgtgttctgtgttagtgatcactgcctttaatacagtctgttggaataatattataagcataataataaagtgaaaatattttaaaactacaa

SEQ ID NO: 2166 - DNA, 13473 bp, Homo sapiens; identical to SEQ ID NO: 212

SEQ ID NO: 2167 - DNA, 2978 bp, Homo sapiens
ggcggcgtttccagttgagagatggcggccgccgcaggtagatcgctcctgctgctcctctcctctcggggcggcggcggcgggggcgccggcggctgcggggcgctgactgccggctgcttccctgggctgggcgtcagccgccaccggcagcagcagcaccaccggacggtacaccagaggatcgcttcctggcagaatttgggagctgtttattgcagcactgttgtgccctctgatgatgttacagtggtttatcaaaatgggttacctgtgatatctgtgaggctaccatcccggcgtgaacgctgtcagttcacactcaagcctatctctgactctgttggtgtatttttacgacaactgcaagaagaggatcggggaattgacagagttgctatctattcaccagatggtgttcgcgttgctgcttcaacaggaatagacctcctcctccttgatgactttaagctggtcattaatgacttaacataccacgtacgaccaccaaaaagagacctcttaagtcatgaaaatgcagcaacgctgaatgatgtaaagacattggtccagcaactatacaccacactgtgcattgagcagcaccagttaaacaaggaaagggagcttattgaaagactagaggatctcaaagagcagctggctcccctggaaaaggtacgaattgagattagcagaaaagctgagaagaggaccactttggtgctatggggtggccttgcctacatggccacacagtttggcattttggcccggcttacctggtgggaatattcctgggacatcatggagccagtaacatacttcatcacttatggaagtgccatggcaatgtatgcatattttgtaatgacacgccaggaatatgtttatccagaagccagagacagacaatacttactatttttccataaaggagccaaaaagtcacgttttgacctagagaaatacaatcaactcaaggatgcaattgctcaggcagaaatggaccttaagagactgagagacccattacaagtacatctgcctctccgacaaattggtgaaaaagattgatctgcaaaaagcctctgaatcctggcagaaggaacacctgtttgcctttttaattaaagcattgcaggtggaagctgggagccatgtggggggtagagcgtttttacctttaattataaaacaaaaacagaaaggatctgagggaagaagggaatgttaaaacctgaggatcaggcattgtggaatataagctcaaagggcttagtgaatattgtcttaaccaagtatctcagtttctggatgaaaatgatgcagttatatagttgagagattcataaagagaaaacaatgctgggggtgttcgtttcttgcatcttctttgcagagtcagcaaaagagtaacacaccagcaccccactcgactctatttgtttttaatttaactgtccctatttttgacataggagtaaataaatatactagaaaagcaaattctcatgatatgctaaaatatcattagcatttattttaaattggacccagtctctgcagagttaccaggaatctttccttccagcatccctttactgtccacctacctgtacctcttggttacactcattttttccatttgataattggaaccaacttataactgtttaataattgacactttagattatctcttaataccttcttaaatgtctatatatcccagtgctctggatcagtgtctaaaaatcactggcaacactgcatgaggttgttggttttgttttgttttattaattagtctttcacaggaggaataattgccctcctttatatacttatctattgataatcccctctccctccagaacacaaatcagagggaaagggggtgttcagctgtactaccaaatcaggaagatgtaaggtttacaaattggctaagaatcatggctctgtagccatttcaaccagaataattttattgctaatctgctttgtgtgacagcattccaggccagccagatgggactgccttgtctggaggctttgttcatctcgaaggacacacacttccacactgtttgtgagccctcccacctccacaacttcagttgtaaatcaagtgtgtggatctcaaagggtgcaatttatctttatataggaatacatttctagggcttccttcaagcccactctcttcaccctattttttcttatcttaaattgagagaaagagaattaatcttatactttgtcaaaacattttctaccatatttccagatgacatctgcgcttgaagagtcaaaggaatctgtgtctaatatcctgtttttaactgctgtaggggcaggatggaaaggatgatgggggctgccacaccactgattggccttttctttcacgtgattcatccttcctcattgtggcaaggagtttctttctctttttcttcctcctttgggatcattgtgtatgaaaagaaaaactttaaatgacaaacccagactccaggtgccttgcaaaggttgaaggccagccaggattgctgctgctgctgctactcctgccaacacccctttcattggcatgacggaatgaaaggatgcatgtctccacttcctgaccctccgcccacttccttctccctccaccacccccagtcgtcagctccttccctcatttatttttgttaagttgtgtgaattatttttaacccatttatcctgtttgtgcatagggtttttaagaagaaacagcacagtgcaacgagcaaatctttttggggtgtgtgggaagcaagggagggaggacatggagaaaagttctttaaacaaatagcaaactattgaacatgtgtaaaatcctgtatcatttatgaaatatgtataaaaagcaatgtaccttctggaacaataaatacttattcaatttttgaaaaaaaaaaaaaaaaaaaaaaaaaaaaaaa

SEQ ID NO: 2168 - DNA, 5758 bp, Homo sapiens
tttctgtactctgggtgactcagagagggaagagattcagccagcacactcctcgcgagcaagcattactctactgactggcagagacaggagaggtagatgtccacgcccacagaccctggtgcgatgccccacccagggccttcgccggggcctgggccttcccctgggccaattcttgggcctagtccaggaccaggaccatccccaggttccgtccacagcatgatggggccaagtcctggacctccaagtgtctcccatcctatgccgacgatggggtccacagacttcccacaggaaggcatgcatcaaatgcataagcccatcgatggtatacatgacaaggggattgtagaagacatccattgtggatccatgaagggcactggtatgcgaccacctcacccaggcatgggccctccccagagtccaatggatcaacacagccaaggttatatgtcaccacacccatctccattaggagccccagagcacgtctccagccctatgtctggaggaggcccaactccacctcagatgccaccaagccagccgggggccctcatcccaggtgatccgcaggccatgagccagcccaacagaggtccctcacctttcagtcctgtccagctgcatcagcttcgagctcagattttagcttataaaatgctggcccgaggccagcccctccccgaaacgctgcagcttgcagtccaggggaaaaggacgttgcctggcttgcagcaacaacagcagcagcaacagcagcagcagcagcagcagcagcagcagcagcagcagcaacagcagccgcagcagcagccgccgcaaccacagacgcagcaacaacagcagccggcccttgttaactacaacagaccatctggcccggggccggagctgagcggcccgagcaccccgcagaagctgccggtgcccgcgcccggcggccggccctcgcccgcgccccccgcagccgcgcagccgcccgcggccgcagtgcccgggccctcagtgccgcagccggccccggggcagccctcgcccgtcctccagctgcagcagaagcagagccgcatcagccccatccagaaaccgcaaggcctggaccccgtggaaattctgcaagagcgggaatacagacttcaggcccgcatagctcataggatacaagaactggaaaatctgcctggctctttgccaccagatttaagaaccaaagcaaccgtggaactaaaagcacttcggttactcaatttccagcgtcagctgagacaggaggtggtggcctgcatgcgcagggacacgaccctggagacggctctcaactccaaagcatacaaacggagcaagcgccagactctgagagaagctcgcatgaccgagaagctggagaagcagcagaagattgagcaggagaggaaacgccgtcagaaacaccaggaatacctgaacagtattttgcaacatgcaaaagattttaaggaatatcatcggtctgtggccggaaagatccagaagctctccaaagcagtggcaacttggcatgccaacactgaaagagagcagaagaaggagacagagcggattgaaaaggagagaatgcggcgactgatggctgaagatgaggagggttatagaaaactgattgatcaaaagaaagacaggcgtttagcttaccttttgcagcagaccgatgagtatgtagccaatctgaccaatctggtttgggagcacaagcaagcccaggcagccaaagagaagaagaagaggaggaggaggaagaagaaggctgaggagaatgcagagggtggggagtctgccctgggaccggatggagagcccatagatgagagcagccagatgagtgacctccctgtcaaagtgactcacacagaaaccggcaaggttctgttcggaccagaagcacccaaagcaagtcagctggacgcctggctggaaatgaatcctggttatgaagttgcccctagatctgacagtgaagagagtgattctgattatgaggaagaggatgaggaagaagagtccagtaggcaggaaaccgaagagaaaatactcctggatccaaatagcgaagaagtttctgagaaggatgctaagcagatcattgagacagctaagcaagacgtggatgatgaatacagcatgcagtacagtgccaggggctcccagtcctactacaccgtggctcatgccatctcggagagggtggagaaacagtctgccctcctaattaatgggaccctaaagcattaccagctccagggcctggaatggatggtttccctgtataataacaacttgaacggaatcttagccgatgaaatggggcttggaaagaccatacagaccattgcactcatcacttatctgatggagcacaaaagactcaatggcccctatctcatcattgttcccctttcgactctatctaactggacatatgaatttgacaaatgggctccttctgtggtgaagatttcttacaagggtactcctgccatgcgtcgctcccttgtcccccagctacggagtggcaaattcaatgtcctcttgactacttatgagtatattataaaagacaagcacattcttgcaaagattcggtggaaatacatgatagtggacgaaggccaccgaatgaagaatcaccactgcaagctgactcaggtcttgaacactcactatgtggcccccagaaggatcctcttgactgggaccccgctgcagaataagctccctgaactctgggccctcctcaacttcctcctcccaacaatttttaagagctgcagcacatttgaacaatggttcaatgctccatttgccatgactggtgaaagggtggacttaaatgaagaagaaactatattgatcatcaggcgtctacataaggtgttaagaccatttttactaaggagactgaagaaagaagttgaatcccagcttcccgaaaaagtggaatatgtgatcaagtgtgacatgtcagctctgcagaagattctgtatcgccatatgcaagccaaggggatccttctcacagatggttctgagaaagataagaaggggaaaggaggtgctaagacacttatgaacactattatgcagttgagaaaaatctgcaaccacccatatatgtttcagcacattgaggaatcctttgctgaacacctaggctattcaaatggggtcatcaatggggctgaactgtatcgggcctcagggaagtttgagctgcttgatcgtattctgccaaaattgagagcgactaatcaccgagtgctgcttttctgccagatgacatctctcatgaccatcatggaggattattttgcttttcggaacttcctttacctacgccttgatggcaccaccaagtctgaagatcgtgctgctttgctgaagaaattcaatgaacctggatcccagtatttcattttcttgctgagcacaagagctggtggcctgggcttaaatcttcaggcagctgatacagtggtcatctttgacagcgactggaatcctcatcaggatctgcaggcccaagaccgagctcaccgcatcgggcagcagaacgaggtccgggtactgaggctctgtaccgtgaacagcgtggaggaaaagatcctcgcggccgcaaaatacaagctgaacgtggatcagaaagtgatccaggcgggcatgtttgaccaaaagtcttcaagccacgagcggagggcattcctgcaggccatcttggagcatgaggaggaaaatgaggaagaagatgaagtaccggacgatgagactctgaaccaaatgattgctcgacgagaagaagaatttgacctttttatgcggatggacatggaccggcggagggaagatgcccggaacccgaaacggaagccccgtttaatggaggaggatgagctgccctcctggatcattaaggatgacgctgaagtagaaaggctcacctgtgaagaagaggaggagaaaatatttgggagggggtcccgccagcgccgtgacgtggactacagtgacgccctcacggagaagcagtggctaagggccatcgaagacggcaatttggaggaaatggaagaggaagtacggcttaagaagcgaaaaagacgaagaaatgtggataaagatcctgcaaaagaagatgtggaaaaagctaagaagagaagaggccgccctcccgctgagaaactgtcaccaaatccccccaaactgacaaagcagatgaacgctatcatcgatactgtgataaactacaaagataggtgtaacgtggagaaggtgcccagtaattctcagttggaaatagaaggaaacagttcagggcgacagctcagtgaagtcttcattcagttaccttcaaggaaagaattaccagaatactatgaattaattaggaagccagtggatttcaaaaaaataaaggaaaggattcgtaatcataagtaccggagcctaggcgacctggagaaggatgtcatgcttctctgtcacaacgctcagacgttcaacctggagggatcccagatctatgaagactccatcgtcttacagtcagtgtttaagagtgcccggcagaaaattgccaaagaggaagagagtgaggatgaaagcaatgaagaggaggaagaggaagatgaagaagagtcagagtccgaggcaaaatcagtcaaggtgaaaattaagctcaataaaaaagatgacaaaggccgggacaaagggaaaggcaagaaaaggccaaatcgaggaaaagccaaacctgtagtgagcgattttgacagcgatgaggagcaggatgaacgtgaacagtcagaaggaagtgggacggatgatgagtgatcagtatggacctttttccttggtagaactgaattccttcctcccctgtctcatttctacccagtgagttcatttgtcatataggcactgggttgtttctatatcatcatcgtctataaactagctttaggatagtgccagacaaacatatgatatcatggtgtaaaaaacacacacatacacaaatatttgtaacatattgtgaccaaatgggcctcaaagattcagattgaaacaaacaaaaagcttttgatggaaaatatgtgggtggatagtatatttctatgggtgggtctaatttggtaacggtttgattgtgcctggttttatcacctgttcagatgagaagatttttgtcttttgtagcactgataaccaggagaagccattaaaagccactggttattttatttttcatcaggcaattttcgaggtttttatttgttcggtattgtttttttacactgtggtacatataagcaactttaataggtgataaatgtacagtagttagatttcacctgcatatacatttttccattttatgctctatgatctgaacaaaagctttttgaattgtataagatttatgtctactgtaaacattgcttaatttttttgctcttgatttaaaaaaaagttttgttgaaagcgctattgaatattgcaatctatatagtgtattggatggcttcttttgtcaccctgatctcctatgttaccaatgtgtatcgtctccttctccctaaagtgtacttaatctttgctttctttgcacaatgtctttggttgcaagtcataagcctgaggcaaataaaattccagtaatttcgaagaatgtggtgttggtgctttcctaataaagaaataatttagcttgacaaaa

SEQ ID NO: 2169 - DNA, 341 bp, Homo sapiens
atgctcctgctgctcgtcccagcgttccaggtgatttttaccctgggaggaaccagagcccagtctgtgacccagcttgacagccaagtccctgtctttgaagaagcccctgtggagctgaggtgcaactactcatcgtctgtttcagtgtatctcttctggtatgtgcaataccccaaccaaggactccagcttctcctgaagtatttatcaggatccaccctggttaaaggcatcaacggttttgaggctgaatttaacaagagtcaaacttccttccacttgaggaaaccctcagtccatataagcgacacggctgagtacttctgtgctgtgagtga

SEQ ID NO: 2170 - DNA, 532 bp, Homo sapiens
  misc_feature (524)..(524): n is a, c, g, or t
tttactctgaggttgttgtatttataaaatggttttcaatgtcaaattacttatttatggcgacccaatgagtatttttactttaaaaaagaaaatggtagtcttaaaaaaaggtaataaaagcttgaactgcagccaatcaatagcttcctttgttaaagatgctgcatcctcacgactaaagaatgaagcacaatagtgaaaatggtctctttggcagcacaagaggtactttctggcagatataattgtcaaacagtaaaatgattcccagggaggctctgggatctctctagtgggctttgacagaggagttactcccctgtgtgtgggaaggaagctggggagctgatgtgataggcaggtcgtctctggtcccaagtgtgtggtcttagctactcatgcaattgcagctaaggtatcatgcctacatcttaaaccactggtctaagtatcttgttagcctaggcttaatgtcttaaattctgtcccagtctgatcaaaaaaccattttcttctcattntctcatgt

SEQ ID NO: 2171 - DNA, 1524 bp, Homo sapiens
aacagttgccttttcctctcacagaaggaagatttcattttgtttgagacgagaaaccaaaccacacaccaaagagaggggtatgatggctaagaagcccccaaaaccagcccctcgcaggatcttccaggaaaggttaaagattactgctctacctttgtactttgaaggttttttattaatcaagcggtcaggataccgggagtatgagcattactggacagagttgagaggaactactcttttcttttataccgacaaaaagagtataatatatgttgacaaattagacatagtagacctcacatgccttactgagcagaattcaactgaaaagaactgtgcgaaattcacccttgttttgccgaaagaggaagtacaactgaagacagagaacacagaaagtggggaagaatggagaggcttcattcttacagtaacagagctgtcagttccccaaaacgtgtcactcctacctgggcaagtaattaaactgcatgaagtcctagagagagaaaagaaaaggaggattgagacagagcagagtacgtccgtggaaaaagagaaggaaccaactgaagattatgtggatgtactgaaccctatgccagcatgtttttatacagtgtcccggaaagaggcaactgagatgctccagaagaacccttctttgggaaatatgatcctgaggcctggtagtgacagtagaaactactccatcactattcggcaggagatagacattccaagaatcaagcactacaaagtgatgagcgtaggacaaaactacactattgaactggaaaaacctgtaacactcccaaaccttttcagtgtcattgattattttgtgaaggagactcgaggaaatttaagaccatttatatgttcaactgatgaaaacactggtcaagaacccagtatggaagggagaagtgaaaagttgaagaaaaatccacacattgcatgaaatacaatgtgaaagctcctttgtatatcttggtaatttatattttcaaaacgaagttcttacttttaaagagaattacctatattctcctgatactgattaccaagtcattcacctgaacaccagaattagaattaaacattgtaccatacaatttcattatcttatcagaatgaaaccaattcacagggaaactagagactacggctgtggtggtaacctgcagatatacacattcccatgcactgacataagttgaaaacacatagtactttctagatggaatttttttctttaggcctcaatgaaatacatttcccctatataattccaacagcagtttctctagttctaaattttaccaattcccaaaaaacctaagttttgctgaaatctgatttgaccaatttatcaaatatgtcattttaattacctagctggaagttagagacatgaaatgtactagaggagcccttttccaatggaaatattatataccacattttttgttaatggaaataaatgtcttcattcccatgttaaaaaaaaaaaaa

SEQ ID NO: 2172 - DNA, 2349 bp, Homo sapiens; identical to SEQ ID NO: 136

SEQ ID NO: 2173 - DNA, 4498 bp, Homo sapiens
cgaggctccaatgagcgcgcgccgcgtccggggccggctggtgcgcgagacgccgccgagaggggcactatggcagacaaagttaggaggcagaggccgaggaggcgagtctgttgggccttggtggctgtgctcttggcagacctgttggcactgagtgatacactggcagtgatgtctgtggacctgggcagtgagtccatgaaggtggccattgtcaaacctggagtgcccatggaaattgtcttgaataaggaatctcggaggaaaacaccggtgatcgtgaccctgaaagaaaatgaaagattctttggagacagtgcagcaagcatggcgattaagaatccaaaggctacgctacgttacttccagcacctcctggggaagcaggcagataacccccatgtagctctttaccaggcccgcttcccggagcacgagctgactttcgacccacagaggcagactgtgcactttcagatcagctcgcagctgcagttctcacctgaggaagtgttgggcatggttctcaattattctcgttctctagctgaagattttgcagagcagcccatcaaggatgcagtgatcaccgtgccagtcttcttcaaccaggccgagcgccgagctgtgctgcaggctgctcgtatggctggcctcaaagtgctgcagctcatcaatgacaacaccgccactgccctcagctatggtgtcttccgccggaaagatattaacaccactgcccagaatatcatgttctatgacatgggctcaggcagcaccgtatgcaccattgtgacctaccagatggtgaagactaaggaagctgggatgcagccacagctgcagatccggggagtaggatttgaccgtaccctggggggcctggagatggagctccggcttcgagaacgcctggctgggcttttcaatgagcagcgcaagggtcagagagcaaaggatgtgcgggagaacccgcgtgccatggccaagctgctgcgtgaggctaatcggctcaaaaccgtcctcagtgccaacgctgaccacatggcacagattgaaggcctgatggatgatgtggacttcaaggcaaaagtgactcgtgtggaatttgaggagttgtgtgcagacttgtttgagcgggtgcctgggcctgtacagcaggccctccagagtgccgaaatgagtctggatgagattgagcaggtgatcctggtgggtggggccactcgggtccccagagttcaggaggtgctgctgaaggccgtgggcaaggaggagctggggaagaacatcaatgcagatgaagcagccgccatgggggcagtgtaccaggcagctgcgctcagcaaagcctttaaagtgaagccatttgtcgtccgagatgcagtggtctaccccatcctggtggagttcacgagggaggtggaggaggagcctgggattcacagcctgaagcacaataaacgggtactcttctctcggatggggccctaccctcaacgcaaagtcatcacctttaaccgctacagccatgatttcaacttccacatcaactacggcgacctgggcttcctggggcctgaagatcttcgggtatttggctcccagaatctgaccacagtgaagctaaaaggggtgggtgacagcttcaagaagtatcctgactacgagtccaagggcatcaaggctcacttcaacctggatgagagtggcgtgctcagtctagacagggtggagtctgtatttgagacactggtagaggacagcgcagaagaggaatctactctcaccaaacttggcaacaccatttccagcctgtttggaggcggtaccacaccagatgccaaggagaatggtactgatactgtccaggaggaagaggagagccctgcagaggggagcaaggacgagcctggggagcaggtggagctcaaggaggaagctgaggccccagtggaggatggctctcagcccccaccccctgaacctaagggagatgcaacccctgagggagaaaaggccacagaaaaagaaaatggggacaagtctgaggcccagaaaccaagtgagaaggcagaggcagggcctgagggcgtcgctccagccccagagggagagaagaagcagaagcccgccaggaagcggcgaatggtagaggagatcggggtggagctggttgttctggacctgcctgacttgccagaggataagctggctcagtcggtgcagaaacttcaggacttgacactccgagacctggagaagcaggaacgggaaaaagctgccaacagcttggaagcattcatatttgagacccaggacaagctgtaccagcccgagtaccaggaagtgtccacagaggagcagcgtgaggagatctctgggaagctcagcgccgcatccacctggctggaggatgagggtgttggagccaccacagtgatgttgaaggagaagctggctgagctgaggaagctgtgccaagggctgttttttcgggtagaggagcgcaagaagtggcccgaacggctgtctgccctcgataatctcctcaaccattccagcatgttcctcaagggggcccggctcatcccagagatggaccagatcttcactgaggtggagatgacaacgttagagaaagtcatcaatgagacctgggcctggaagaatgcaactctggccgagcaggctaagctgcccgccacagagaagcctgtgttgctctcaaaagacattgaagctaagatgatggccctggaccgagaggtgcagtatctgctcaataaggccaagtttaccaagccccggccccggcctaaggacaagaatgggacccgggcagagccacccctcaatgccagtgccagtgaccagggggagaaggtcatccctccagcaggccagactgaagatgcagagcccatttcagaacctgagaaagtagagactggatccgagccaggagacactgagcctttggagttaggaggtcctggagcagaacctgaacagaaagaacaatcgacaggacagaagcggcctttgaagaacgacgaactataacccccacctctgttttccccattcatctccacccccttcccccaccacttctatttatttaacatcgagggttgggggaggggttggtcctgccctcggctggagttcctttctcacccctgtgatttggaggtgtggagaaggggaagggagggacagctcactggttccttctgcagtacctctgtggttaaaaatggaaactgttctcctccccagccccactccctgttccctacccatataggccctaaatttgggaaaaatcactattaatttctgaatcctttgcctgtgggtaggaagagaatggctgccagtggctgatgggtcccggtgatgggaagggtatcaggttgctggggagtttccactcttctctggtgattgttccttccctcccttcctctcccaccatgcgatgagcatcctttcaggccagtgtctgcagagcctcagttaccaggtttggtttctgagtgcctatctgtgctctttcctccctctgcgggcttctcttgctctgagcctcccttccccattccccatccagctcctttccccctgggtttccttggcttcctgcagcaaattgggcagttctctgccccttgcctaaaagcctgtacctctggattggcggaagtaaatctggaaggattctcactcgtatttcccacccctagtggccagaggagggaggggcacagtgaagaagggagcccaccacctctccgaagaggaaagccacgtagagtggttggcatggggtgccagcatcgtgcaagctctgtcataatctgcatcttcccagcagcctggtaccccaggttcctgtaactccctgcctcctcctctcttctgctgttctgctcctcccagacagagcctttccctcaccccctgaccccctgggctgaccaaaatgtgctttctactgtgagtccctatcccaagatcctggggaaaggagagaccatggtgtgaatgtagagatgccacctccctctctctgaggcaggcctgtggatgaaggaggagggtcagggctggccttcctctgtgcatcactctgctaggttgggggcccccgacccaccatacctacgcctagggagcccgtcctccagtattccgtctgtagcaggagctagggctgctgcctcagctccaagacaagaatgaacctggctgtgtcagtcattttgtcttttccttttttttttttttttgccacattggcagagatgggacctaagggtcccacccctcaccccacccccacctcttctgtatgtttgaattctttcagtagctgttgatgctggttggacaggtttgagtcaaattgtactttgctccattgttaattgagaaactgtttcaataaaatattcttttctacagttaaaaaaaaaaaaaaaaaaaa

SEQ ID NO: 2174 - DNA, 6572 bp, Homo sapiens
agctgatgcgcgccccgccggccgggaggcgggagtccgcgagccgggagcgggagcagcagaggtctagcagccgggcgccgcgggccgggggcctgaggaggccacaggacgggcgtcttcccggctagtggagcccggcgcggggcccgctgcggccgcaccgtgaggggaggaggccgaggaggacgcagcgccggctgccggcgggaggaagcgctccaccagggcccccgacggcactcgtttaaccacatccgcgcctctgctggaaacgcttgctggcgcctgtcaccggttccctccattttgaaagggaaaaaggctctccccacccattcccctgcccctaggagctggagccggaggagccgcgctcatggcgttcagcccgtggcagatcctgtcccccgtgcagtgggcgaaatggacgtggtctgcggtacgcggcggggccgccggcgaggacgaggctggcgggcccgagggcgaccccgaggaggaggattcgcaagccgagaccaaatccttgagtttcaggagtggctgtaaggtgaagaagcatgaaactcagtctctcgccctggatgcatgttctcgggatgaaggggcagtgatctcccagatttcagacatttctaatagggatggccatgctactgatgaggagaaactggcatccacgtcatgtggtcagaaatcagctggtgccgaggtgaaaggtgagccagaggaagacctggagtactttgaatgttccaatgttcctgtgtctaccataaatcatgcgttttcatcctcagaagcaggcatagagaaggagacgtgccagaagatggaagaagacgggtccactgtgcttgggctgctggagtcctctgcagagaaggcccctgtgtcggtgtcctgtggaggtgagagccccctggatgggatctgcctcagcgaatcagacaagacagccgtgctcaccttaataagagaagagataattactaaagagattgaagcaaatgaatggaagaagaaatacgaagagacccggcaagaagttttggagatgaggaaaattgtagctgaatatgaaaagactattgctcaaatgattgaagatgaacaaaggacaagtatgacctctcagaagagcttccagcaactgaccatggagaaggaacaggccctggctgaccttaactctgtggaaaggtccctttctgatctcttcaggagatatgagaacctgaaaggtgttctggaagggttcaagaagaatgaagaagccttgaagaaatgtgctcaggattacttagccagagttaaacaagaggagcagcgataccaggccctgaaaatccacgcagaagagaaactggacaaagccaatgaagagattgctcaggttcgaacaaaagcaaaggctgagagtgcagctctccatgctggactccgcaaagagcagatgaaggtggagtccctggaaagggccctgcagcagaagaaccaagaaattgaagaactgacaaaaatctgtgatgagctgattgcaaagctgggaaagactgactgagacactccccctgttagctcaacagatctgcatttggctgcttctcttgtgaccacaattatcttgccttatccaggaataattgcccctttgcagagaaaaaaaaaaacttaaaaaaagcacatgcctactgctgcctgtcccgctttgctgccaatgcaacagccctggaagaaaccctagagggttgcatagtctagaaaggagtgtgacctgacagtgctggagcctcctagtttccccctatgaaggttcccttaggctgctgagtttgggtttgtgatttatctttagtttgttttaaagtcatctttactttcccaaatgtgttaaatttgtaactcctctttggggtcttctccaccacctgtctgatttttttgtgatctgtttaatcttttaattttttagtatcagtggttttatttaaggagacagtttggcctattgttacttccaatttataatcaagaaggggctctggatccccttttaaattacacacactctcacacacatacatgtatgtttatagatgctgctgctcttttccctgaagcatagtcaagtaagaactgctctacagaaggacatatttccttggatgtgagaccctattttgaaatagagtcctgactcagaacaccaacttaagaatttgggggattaaagatgtgaagaccacagtcttgggttttcatatctggagaagactatttgccatgacgttttgttgccctggtatttggacactcctcagctttaatgggtgtggcccctttagggttagtcctcagactaatgatagtgtctgctttctgcatgaacggcaatatgggactccctccaagctagggtttggcaagtctgccctagagtcatttactctcctctgcctccatttgttaatacagaatcaacatttagtcttcattatctttttttttttttttgagacagagtttcgatctattttaagtatgtgaagaaaatctacttgtaaaaggctcagatcttaattaaaaggtaattgtagcacattaccaattataaggtgaagaaatgtttttttcccaagtgtgatgcattgttcttcagatgttgaaaagaaagcaaaaaataccttctaacttaagacagaatttttaacaaaatgagcagtaaaagtcacatgaaccactccaaaaatcagtgcattttgcatatttttaaacaaagacagcttgttgaatactgagaagaggagtgcaaggagaaggtctgtactaacaaagccaaattcctcaagctcttactggactcagttcagagtggtgggccattaaccccaacatggaatttttccatataaatctcaatgaattccctttcatttgaataggcaaacccaaatccatgcaagtgttttaaagcactgtcctgtcttaatcttacatgctgaaagtcttcatggtgatatgcactatattcagtatacgtatgttttcctacttctcttgtaaaactgttgcatgatccaacttcagcaatgaattgtgcctagtggagaacctctatagatcttaaaaaatgaattattctttagcagtgtattactcacatgggtgcaatctttagccccagggaggtcaataatgtcttttaaagccagaagtcacattttaccaatatgcatttatcataattggtgcttaggctgtatattcaagcctgttgtcttaacattttgtataaaaaagaacaacagaaattatctgtcatttgagaagtggcttgacaatcatttgagctttgaaagcagtcactgtggtgtaatatgaatgctgtcctagtggtcatagtaccaagggcacgtgtctccccttggtataactgatttcctttttagtcctctactgctaaataagttaattttgcattttgcagaaagaaacattgattgctaaatctttttgctgctgtgttttggtgttttcatgtttacttgttttatattgatctgttttaagtatgagaggcttatagtgccctccattgtaaatccatagtcatctttttaagcttattgtgtttaagaaagtagctatgtgttaaacagaggtgatggcagcccttccctagcacactggtggaagagaccccttaagaacctgaccccagtgaatgaagctgatgcacagggagcaccaaaggaccttcgttaagtgataattgtcctggcctctcagccatgaccgttatgaggaaatatcccccattcgaacttaacagatgcctcctctccaaagagaattaaaatcgtagcttgtacagatcaagagaatatactgggcagaatgaagtatgtttgtttatttttctttaaaaataaaggattttggaactctggagagtaagaatatagtatagagtttgcctcaacacatgtgagggccaaataacctgctagctaggcagtaataaactctgttacagaagagaaaaagggccgggcacagtggcttattcctgtaatcccaacactgtggaaggccgaggcaggaggatcacttgagtccaggagtttgaaacctacctaggcaacatggtgaaaccttgtctctaccaaaataaaaattagctgggcatggtggcacgtgcctgtggtcccagctacttgggaggctgaggtgggagcctgggaggtcaaggctgcagtgagccatgatcatgccactgcactccatcctgggtgacagcaagatcttgtctcaaaaaaaaaaaaaaaaaaaaaaaaaccaggagtgaaaaaggaaagtagaaggcagctgctggcctagatgttggtttgggaatattaggtgatcctgttgagattctggatccagagcaatttctttagcttttgactttgccaaagtgtagatagcctttatccagcagtattttaagtggggaatgcaacgtgaggccaactgaacaattccccccgtggctgcccagatagtcacagtcaaggttggagagtctccttccagccagtgacctacccaaaccttttgttctgtaaaactgctctggaaataccgggaagcccagttttctcacgtggtttctagcttcttcagactcagcccaaattaggaagtgcagaagcacatgatggtgaaaaacctaggatttggcagccttccagaatggtatggaatctgagggaagatttatgtttcgttttggaggatagctcaagttgaattttctttccagccagttaccctttcaacctacccatactttgtacaactcttacacaaatacttagatatttattagatagccctgaattcactctaattataaacagggagtgtaaactgcccccagatgttcctgggctgggtaaaagcagctggagtgaagcactcattttccataaaggtaacaaagggcagctcagtggttactcaagctcaaaagggtttttttaagagcaagcattggttaagtctgtgtatactgagttggaagtgatttcagcacattcttttttagtggagtgaaagttctgaagcccccttttaacttcctcttggtttttcattataattggtagccatctcatgaactgtctctgactgttgtctctttgtggtcatgtgattgtgagcttgctttctgacttgcatttctgactttatcctgttgttaggaagatagaaactaggttttgaaagattacatgattcaagcgagggattttaaagtaaagatgtatttattctgaagaatctaaaagataacagattatttgcttatgaaagaacaatatagtctgggaatcccagaatgtcaagccaaaggtctaagaagtcatctccttcaaatactttaataaagaagtatttcgaggagatatctgtccaaaaaggtttgactggcctccagattccagttatttttaaaaagcaacttaccactaaatccttgagtctccatagagtaacagtaaagaaactgatgtaacagactctcctctcaaaggatctcctctggaagagactatcagcggcagcattctccagggaagacccatcccctagtgccagagcttgcatcctggagactaaagattgcacttttttgtagttttttgtccaaatgcaatcccatttctgtgcctcttagcatgcagttagatttggacaaacaagattcctaaggaatgactttattaactataatatggttacagctattatataaatatatattctggttatagttctaatatggagatgttgtgtgcaatgctggcctgtggtggtctgtgtaatgctttaacttgtatggaggaggccaggctcagagctgagatgtggcctgaaccttccctgtatcgatcctttaatttagaactgtcaagatgtcactttctccccctctgccttttagtggtatctgacatatactcaaaacagtaatttcctggtcacatcattaactgctaattctgtatttataaagaattttcagatggacatgtacaaatttgaactcaaaccatccccagtccagatacagggcagcgtgtaggtgaccacaccagagcctcagcctcggtccttctcagccgtcgggataggatccaggcatttcttttaaatctcagaggtagcagtaaacttttcagtattgctgttagcaagtgtgtgtttgccaatagatacccattatactaatgtgccaagtaaatgttcattgcacatctgcttccactgtgttcccacgggtgccatgaagtgtgtgaggagcccctcatctggagggatgagtgctgcgttgactactgctatcaggattgtgttgtgtggaatattcatctacataaattttatatgcacagtaatttccctttttatatgtcaagtaactatttgtaaaagttatactcacaaattattataatgattactaatatattttttccatgtttcattgcctgaataaaaactgtttaccactgtta

SEQ ID NO: 2175 - DNA, 3859 bp, Homo sapiens
gtgatctgcgggttgctggggagaggcgcggagaggcgggcgagagtccgcagggcaggcgctgattggctgaggtgggagcagcttcccttccgatgattcggctcttctcggctcagtctcagcgaagcgtctgcgaccgtcgtttgagtcgtcgctgccgctgccgctgccactgccactgccacctcgcggatcaggagccagcgttgttcgcccgacgcctcgctgccggtgggaggaagcgagagggaagccgcttgcgggtttgtcgccgctgctcgcccaccgcctggaagagccgagccccggcccagtcggtcgcttgccaccgctcgtagccgttacccgcgggccgccacagccgccggccgggagaggcgcgcgccatggcttctggagccgattcaaaaggtgatgacctatcaacagccattctcaaacagaagaaccgtcccaatcggttaattgttgatgaagccatcaatgaggacaacagtgtggtgtccttgtcccagcccaagatggatgaattgcagttgttccgaggtgacacagtgttgctgaaaggaaagaagagacgagaagctgtttgcatcgtcctttctgatgatacttgttctgatgagaagattcggatgaatagagttgttcggaataaccttcgtgtacgcctaggggatgtcatcagcatccagccatgccctgatgtgaagtacggcaaacgtatccatgtgctgcccattgatgacacagtggaaggcattactggtaatctcttcgaggtataccttaagccgtacttcctggaagcgtatcgacccatccggaaaggagacatttttcttgtccgtggtgggatgcgtgctgtggagttcaaagtggtggaaacagatcctagcccttattgcattgttgctccagacacagtgatccactgcgaaggggagcctatcaaacgagaggatgaggaagagtccttgaatgaagtagggtatgatgacattggtggctgcaggaagcagctagctcagataaaggagatggtggaactgcccctgagacatcctgccctctttaaggcaattggtgtgaagcctcctagaggaatcctgctttacggacctcctggaacaggaaagaccctgattgctcgagctgtagcaaatgagactggagccttcttcttcttgatcaatggtcctgagatcatgagcaaattggctggtgagtctgagagcaaccttcgtaaagcctttgaggaggctgagaagaatgctcctgccatcatcttcattgatgagctagatgccatcgctcccaaaagagagaaaactcatggcgaggtggagcggcgcattgtatcacagttgttgaccctcatggatggcctaaagcagagggcacatgtgattgttatggcagcaaccaacagacccaacagcattgacccagctctacggcgatttggtcgctttgacagggaggtagatattggaattcctgatgctacaggacgcttagagattcttcagatccataccaagaacatgaagctggcagatgatgtggacctggaacaggtagccaatgagactcacgggcatgtgggtgctgacttagcagccctgtgctcagaggctgctctgcaagccatccgcaagaagatggatctcattgacctagaggatgagaccattgatgccgaggtcatgaactctctagcagttactatggatgacttccggtgggccttgagccagagtaacccatcagcactgcgggaaaccgtggtagaggtgccacaggtaacctgggaagacatcgggggcctagaggatgtcaaacgtgagctacaggagctggtccagtatcctgtggagcacccagacaaattcctgaagtttggcatgacaccttccaagggagttctgttctatggacctcctggctgtgggaaaactttgttggccaaagccattgctaatgaatgccaggccaacttcatctccatcaagggtcctgagctgctcaccatgtggtttggggagtctgaggccaatgtcagagaaatctttgacaaggcccgccaagctgccccctgtgtgctattctttgatgagctggattcgattgccaaggctcgtggaggtaacattggagatggtggtggggctgctgaccgagtcatcaaccagatcctgacagaaatggatggcatgtccacaaaaaaaaatgtgttcatcattggcgctaccaaccggcctgacatcattgatcctgccatcctcagacctggccgtcttgatcagctcatctacatcccacttcctgatgagaagtcccgtgttgccatcctcaaggctaacctgcgcaagtccccagttgccaaggatgtggacttggagttcctggctaaaatgactaatggcttctctggagctgacctgacagagatttgccagcgtgcttgcaagctggccatccgtgaatccatcgagagtgagattaggcgagaacgagagaggcagacaaacccatcagccatggaggtagaagaggatgatccagtgcctgagatccgtcgagatcactttgaagaagccatgcgctttgcgcgccgttctgtcagtgacaatgacattcggaagtatgagatgtttgcccagacccttcagcagagtcggggctttggcagcttcagattcccttcagggaaccagggtggagctggccccagtcagggcagtggaggcggcacaggtggcagtgtatacacagaagacaatgatgatgacctgtatggctaagtggtggtggccagcgtgcagtgagctggcctgcctggaccttgttccctgggggtgggggcgcttgcccaggagagggaccaggggtgcgcccacagcctgctccattctccagtctgaacagttcagctacagtctgactctggacagggggtttctgttgcaaaaatacaaaacaaaagcgataaaataaaagcgattttcatttggtaggcggagagtgaattaccaacagggaattgggccttgggcctatgccatttctgttgtagtttggggcagtgcaggggacctgtgtggggtgtgaaccaaggcactactgccacctgccacagtaaagcatctgcacttgactcaatgctgcccgagccctcccttccccctatccaacctgggtaggtgggtaggggccacagttgctggatgtttatatagagagtaggttgatttattttacatgcttttgagttaatgttggaaaactaatcacaagcagtttctaaaccaaaaaatgacatgttgtaaaaggacaataaacgttgggtcaaaatggagcctgagtcctgggccctgtgcctgcttcttttcctgggaacagccttgggctacccaccactcccaaggcattcttccaaatgtgaaatcctggaagtaagattgcaccttcttcctctcctgatcaacatcggtatgatgtctcctgttgcctcaccctttgtctgcagtatcactggataggactggtggaaagggagcagcctgacagagctccaaatgtggagaatatggcatccctccacctatatttgatgtggacggtaaggctaggcctgcaggatcccttatcctgaccaaagactgtgttggggtgccatttgaaaatcgcagggttgcaaaagaatacaatcttacttgcaggtggatattctctatactctcttttaatgcatctaaaaatcccaaacatcccctggttggtgatcacttacagttgtgtccacctttattttatgtactttgattaaaaaaaaaaaactttttgttaatat

SEQ ID NO: 2176 - DNA, 354 bp, Homo sapiens
tttttttttttttttttttttccccttttattttttatttattatactcattttttgttggaatcctacccgcccccctccgccccgcccacggcccctttaaaattgacagccaagatttgctggcaaacattctttttgtccttggatgctacaattccaggttctgccttttatctcccaagctcagaagtttcctggggccaatttttgcagctcaaaattgtccgtgcgattttgttcttcaccgctttgaaacaggaacaccttgccctgttgctttgccactccccattttctttggggatgactgcctccaggaatactcattttatattagtcaaaggggtgaaa

SEQ ID NO: 2177 - DNA, 6836 bp, Homo sapiens; identical to SEQ ID NO: 1116

SEQ ID NO: 2178 - DNA, 1939 bp, Homo sapiens
gtggacaggccgctgaaaggaaccggctgcggcctgtgtgaggctccgcgggccgctgcactgcgaggccgacgcagctggagagaagttaggcaggtcctagggagggcaggctcgagtgctgggcccgcctccccgcgggactgtaggcccgggggctccgcctcgtcgcagcggcagaagtgatgccaccaaaaagaaatgaaaaatacaaacttcctattccatttccagaaggcaaggttctggatgatatggaaggcaatcagtgggtactgggcaagaagattggctctggaggatttggattgatatatttagctttccccacaaataaaccagagaaagatgcaagacatgtagtaaaagtggaatatcaagaaaatggcccgttattttcagaacttaaattttatcagagagttgcaaaaaaagactgtatcaaaaagtggatagaacgcaaacaacttgattatttaggaattcctctgttttatggatctggtctgactgaattcaagggaagaagttacagatttatggtaatggaaagactaggaatagatttacagaagatctcaggccagaatggtacctttaaaaagtcaactgtcctgcaattaggtatccgaatgttggatgtactggaatatatacatgaaaatgaatatgttcatggtgatataaaagcagcaaatctacttttgggttacaaaaatccagaccaggtttatcttgcagattatggactttcctacagatattgtcccaatgggaaccacaaacagtatcaggaaaatcctagaaaaggccataatgggacaatagagtttaccagcttggatgcccacaagggagtagccttgtccagacgaagtgacgttgagatcctcggctactgcatgctgcggtggttgtgtgggaaacttccctgggaacagaacctgaaggaccctgtggctgtgcagactgctaaaacaaatctgttggacgagctcccccagtcagtgcttaaatgggctccttctggaagcagttgctgtgaaatagcccaatttttggtatgtgctcatagtttagcatatgatgaaaagccaaactatcaagccctcaagaaaattttgaaccctcatggaatacctttaggaccactggacttttccacaaaaggacagagtataaatgtccatactccaaacagtcaaaaagttgattcacaaaaggctgcaacaaagcaagtcaacaaggcacacaataggttaatcgaaaaaaaagtccacagtgagagaagcgctgagtcctgtgcaacatggaaagtgcagaaagaggagaaactgattggattgatgaacaatgaagcagctcaggaaagcacaaggagaagacagaaatatcaagagtctcaagaacctttgaatgaagtaaacagtttcccacaaaaaatcagctatacacaattcccaaactcattttatgagcctcatcaagattttaccagtccagatatattcaagaagtcaagatctccatcttggtataaatacacttccacagtcagcacggggatcacagacttagaaagttcaactggactttggcctacaatttcccagtttactcttagtgaagagacaaacgcagatgtttattattatcgcatcatcatacctgtccttttgatgttagtatttcttgctttattttttctctgaagatgataccaaaattccttttgataattttttaagtttccagctcttcaccgaaatgttgtattcttatttcagtgtttccttccagacatttttaaggtaattggctttaaaaagagaacatattttaacaaagtttgtggacactctaaaaaataaaattgctttgtactagaaatagtgtcatagaatagtgtcatagtacagtttggaaaacacttctgaag

SEQ ID NO: 2179 - DNA, 3040 bp, Homo sapiens
aaatcctcctcctccgccatcatccgccgcggtgcggagagcaggtggtgctggaagcgcgtgaggccgggagctcgagagagctaacagactagccggctggacatctggaccgctggatccggaggtggcgaccccggcctgacccggaccctaaatccgtccccgccccagagggcggaggcgcgcgctcgattccccccacgcggcggcgccgcctgtttacgtctgcagatctccaggggagcccaccagcctagtcaacatggcctcggaagacattgccaagctggcagagacacttgccaagactcaggtggccgggggacagctgagtttcaaaggcaagagcctcaaactcaacactgcagaagatgctaaagatgtgattaaagagattgaagactttgacagcttggaggctctgcgtctggaaggcaacacagtgggcgtggaagcagccagggtcatcgccaaggccttagagaagaagtcggagttgaagcgctgccactggagtgacatgttcacgggaaggctgcggaccgagatcccaccagccctgatctcactaggggaaggactcatcacagctggggctcagctggtggagctggacttaagcgacaacgcattcgggcccgacggtgtgcaaggcttcgaggccctgctcaagagctcagcctgcttcaccctgcaggaactcaagctcaacaactgtggcatgggcattggcggcggcaagatcctggctgcagctctgaccgaatgtcaccggaaatccagtgcccaaggcaagcctctggccctgaaggtctttgtggctggcagaaaccgtctggagaatgatggcgccactgccttggcagaagcttttagggtcatcgggaccctggaggaggtccacatgccacagaatgggatcaaccaccctggcatcactgccctggcccaggctttcgctgtcaaccccctgctgcgggtcatcaacctgaatgacaacaccttcactgagaagggcgccgtggccatggccgagaccttgaagaccttgcggcaggtggaggtgattaattttggggactgcctggtgcgctccaagggtgcagttgccattgcagatgccatccgcggcggcctgcccaagctaaaggagctgaacttgtcattctgtgaaatcaagagggatgctgccctggctgttgctgaggccatggcagacaaagctgagctggagaagctggacctgaatggcaacaccctgggagaagaaggctgtgaacagcttcaggaggtgctggagggcttcaacatggccaaggtgctggcgtccctcagtgatgacgaggacgaggaggaggaggaggaaggagaagaggaagaagaggaagcagaagaagaggaggaggaagatgaggaagaggaggaagaagaggaggaggaggaggaagaagagcctcagcagcgagggcagggagagaagtcagccacgccctcacggaagattctggaccctaacactggggagccagctcccgtgctgtcctccccacctcctgcagacgtctccaccttcctggcttttccctctccagagaagctgctgcgcctagggcccaagagctccgtgctgatagcccagcagactgacacgtctgaccccgagaaggtggtctctgccttcctaaaggtgtcatctgtgttcaaggacgaagctactgtgaggatggcagtgcaggatgcagtagatgccctgatgcagaaggctttcaactcctcgtccttcaactccaacaccttcctcaccaggctgctcgtgcacatgggtctgctcaagagtgaagacaaggtcaaggccattgccaacctgtacggccccctgatggcgctgaaccacatggtgcagcaggactatttccccaaggcccttgcacccctgctgctggcgttcgtgaccaagcccaacagcgccctggaatcctgctccttcgcccgccacagtctgctgcagacgctgtacaaggtctagactcaaagcctctcccatcccttggcctggaccagtgagctggggagggactcggatgaactgaggcgcagcctacgccattgccttggacaggactctggccacaggcagggcgggtctgtgtcccatgtgtcctgtcagtcccctgagtatgtgtgtgggtgtggcgcatgtgcaggtctgtgcctcctgtcgggatttgggttttaacgtcttctgctggcccagccctgctctgttgtggggagttggcccccaggggaaagggctgtgagctgctccgccattaaactcacctccacctgagggcgctctgctgatctccgcctgggccctgatggccgtccccacccacctgccttccggcccggctccctggcggagccagaacccagggagttgcccgcgtgctgtccttcccctctgtgttgtgattgggttgtttcctgccctgcctggggctgcttctcgtcaccaagccctggtcctgcggcagctgtcacccctaccatccataccactgtgctgaccgctcagcctgaagagcagagaatgccatgggtgggactgtgggggtcggatcgtggggttgttggcagagggcaaccctgggccccacaccgtgtggacaggcagacaccagattgtccaggagcaggagctgctgggactgcgctggccccggacctagtgggccttctcctggctgctgagatgtcgtctgtgactggcctggctggagggggagtgttgacaacccaaagctgttctccagtctggggagggagaggcagggtccccaatgtccgagctgcatctggacgctgctcttaaaggacctcctggggcaggggagcggtagggtctggactgggcagatgctgtatgacctccctgagcacccgtgactgccccatgctttcccctttgtgctctgtgtgtgtctgggctgtgcccgggggcttcacaaataaagtcgtgtggcagcttcaaaaaaaaaaaaaaaaaaaa

SEQ ID NO: 2180 - DNA, 459 bp, Homo sapiens
atggctcgtacgaagcaaacagctcgcaagtctaccggcggcaaagctccgcgcaagcagcttgctactaaagcagcccgtaagagcgctccggccaccggtggcgtgaagaaacctcatcgctaccgcccgggcaccgtggccttgcgcgaaatccgtcgctaccagaagtccaccgagctgctgatccggaagctgccgttccagcgcctggtgcgagaaatcgcccaggacttcaaaaccgacctgcgtttccagagctctgcggtgatggcgctgcaggaggcttgtgaggcctacctggtgggactcttcgaagacaccaatctgtgcgctattcacgctaaacgcgtcaccatcatgcccaaagatatccagctggcacgtcgcatccgtggggaaagggcataagtctgcccgtttcttcctcattgaaaaggctcttttcagagccactca

SEQ ID NO: 2181 - DNA, 1229 bp, Homo sapiens
gccctgcttatcagcagcttcccagcttcctctgcctggattcttagaggcctggggtcctagaacgagctggtgcacgtggcttcccaaagatctctcagataatgagaggaaatgcagtcatcagtttgcagaaggctagggattctgggccatagctcagacctgcgcccaccatctccctccaggcagcccttggctggtccctgcgagcccgtggagactgccagagatgtcctctttcggttacaggaccctgactgtggccctcttcaccctgatctgctgtccaggatcggatgagaaggtattcgaggtacacgtgaggccaaagaagctggcggttgagcccaaagggtccctcgaggtcaactgcagcaccacctgtaaccagcctgaagtgggtggtctggagacctctctagataagattctgctggacgaacaggctcagtggaaacattacttggtctcaaacatctcccatgacacggtcctccaatgccacttcacctgctccgggaagcaggagtcaatgaattccaacgtcagcgtgtaccagcctccaaggcaggtcatcctgacactgcaacccactttggtggctgtgggcaagtccttcaccattgagtgcagggtgcccaccgtggagcccctggacagcctcaccctcttcctgttccgtggcaatgagactctgcactatgagaccttcgggaaggcagcccctgctccgcaggaggccacagccacattcaacagcacggctgacagagaggatggccaccgcaacttctcctgcctggctgtgctggacttgatgtctcgcggtggcaacatctttcacaaacactcagccccgaagatgttggagatctatgagcctgtgtcggacagccagatggtcatcatagtcacggtggtgtcggtgttgctgtccctgttcgtgacatctgtcctgctctgcttcatcttcggccagcacttgcgccagcagcggatgggcacctacggggtgcgagcggcttggaggaggctgccccaggccttccggccatagcaaccatgagtggcatggccaccaccacggtggtcactggaactcagtgtgactcctcagggttgaggtccagccctggctgaaggactgtgacaggcagcagagacttgggacattgccttttctagcccgaatacaaacacctggacttaaaaaaaaaaaaaaaaaa

SEQ ID NO: 2182 - DNA, 4090 bp, Homo sapiens
gggcgctcccggagtatcagcaaaagggttcgccccgcccacagtgcccggctccccccgggtatcaaaagaaggatcggctccgcccccgggctccccgggggagttgatagaagggtccttcccaccctttgccgtccccactcctgtgcctacgacccaggagcgtgtcagccaaagcatggagaatcaagagaaggcgagtatcgcgggccacatgttcgacgtagtcgtgatcggaggtggcatttcaggactatctgctgccaaactcttgactgaatatggcgttagtgttttggttttagaagctcgggacagggttggaggaagaacatatactataaggaatgagcatgttgattacgtagatgttggtggagcttatgtgggaccaacccaaaacagaatcttacgcttgtctaaggagctgggcatagagacttacaaagtgaatgtcagtgagcgtctcgttcaatatgtcaaggggaaaacatatccatttcggggcgcctttccaccagtatggaatcccattgcatatttggattacaataatctgtggaggacaatagataacatggggaaggagattccaactgatgcaccctgggaggctcaacatgctgacaaatgggacaaaatgaccatgaaagagctcattgacaaaatctgctggacaaagactgctaggcggtttgcttatctttttgtgaatatcaatgtgacctctgagcctcacgaagtgtctgccctgtggttcttgtggtatgtgaagcagtgcgggggcaccactcggatattctctgtcaccaatggtggccaggaacggaagtttgtaggtggatctggtcaagtgagcgaacggataatggacctcctcggagaccaagtgaagctgaaccatcctgtcactcacgttgaccagtcaagtgacaacatcatcatagagacgctgaaccatgaacattatgagtgcaaatacgtaattaatgcgatccctccgaccttgactgccaagattcacttcagaccagagcttccagcagagagaaaccagttaattcagcggcttccaatgggagctgtcattaagtgcatgatgtattacaaggaggccttctggaagaagaaggattactgtggctgcatgatcattgaagatgaagatgctccaatttcaataaccttggatgacaccaagccagatgggtcactgcctgccatcatgggcttcattcttgcccggaaagctgatcgacttgctaagctacataaggaaataaggaagaagaaaatctgtgagctctatgccaaagtgctgggatcccaagaagctttacatccagtgcattatgaagagaagaactggtgtgaggagcagtactctgggggctgctacacggcctacttccctcctgggatcatgactcaatatggaagggtgattcgtcaacccgtgggcaggattttctttgcgggcacagagactgccacaaagtggagcggctacatggaaggggcagttgaggctggagaacgagcagctagggaggtcttaaatggtctcgggaaggtgaccgagaaagatatctgggtacaagaacctgaatcaaaggacgttccagcggtagaaatcacccacaccttctgggaaaggaacctgccctctgtttctggcctgctgaagatcattggattttccacatcagtaactgccctggggtttgtgctgtacaaatacaagctcctgccacggtcttgaagttctgttcttatgctctctgctcactggttttcaataccaccaagaggaaaatattgacaagtttaaaggctgtgtcattgggccatgtttaagtgtactggatttaactacctttggcttaattccaatcattgttaaagtaaaaacaattcaaagaatcacctaattaatttcagtaagatcaagctccatcttatttgtcagtgtagatcaactcatgttaattgatagaataaagccttgtgatcactttctgaaattcacaaagttaaacgtgatgtgctcatcagaaacaatttctgtgtcctgtttttattcccttcaatgcaaaatacatgatgatttcagaaacaaagcatttgactttctgtctgtggaggtggagtaggtgaaggcccagcctgtaactgtcctttttcttcccttaggcaatggtgaactgtcattacagagcctagaggctcacagcctcctggaggaagcagcctccactttggatcaggaaatagtaaaggaaagcagtgttgggggtagcggcatgcagaccctcagaccagaatggggacatcttgtggtctgctgcctcaggaatctcctgaccacttgtagtccctccgacttctctagacatctagtctcagtgctagcttatttgtatttttcctctttcacttcttatggaggagagtgtttaactgagttagaatgttgaaactgacttgctgtgacttatgtgcagctttccagttgagcagaggaaaatagtggcaggactgtcccccaggaggactccctgcttagctctgtgggagaccaactacgactggcatcttctcttccccctggaaggcagctagacaccaatggatccttgtcagttgtaacattctatttcaacttcaggaaagcagcagttttcttttaatttttcctatgaccataaaattagacatacctctcaacttacatatgtcttcaacatggttacctctgcataaatattagcaaagcatgccaatttctcttaagtactgaaatacatatgataaatttgactgttatttgttgagactatcaaacagaaaagaaattagggctctaatttccttaaagcaagctcacttgctttagttgttaagttttataaaagacatgaaattgagtcattttatatatgaaaactaagttctctatcttaggagtaatgtcggcccacaagggtgcccacctcttgttttccccttttaaaaactcagatttttaaaagccctttccaaaggtttcaactgtaaaatacttctttttacaatgtatcaacatatttttatttaaggggaattaacaattgccagggaaaccagccaacccaagtttattatatcattaaccttatcataaattcaaacctaagttgctggaccctggtgtgaggacataaatcttccaaagttttgcctatcctaagagctgcatttttctactgctctttaccttgcattttagctaatttaggagttttgagaatgtattggatacgctccagtacataaggagttgccgcatattatatcagactgctttgagaaatctcatccctagtctattgcagttgtttctattagcttactgattaactcagtcctgacacaccttttgggaaatgctgatttaaacttcttaactggcaacagttggaacagtaatcagtttgctaacatatttaaagtcttgaatgttgaagaactcatgtgatttacccttttcaactttttggaaaacgatttaatttattctaattagattaaccctattaatctatggattgggtatcaaaatgaatgccagtccagatgtgcctagacacgaaattggagctgaggactctcacgatatgcaagttcatccaacgtgaagataccataagctttttctctgaaccagagaaatgaaagtcagtttaagaggctgatagatcttggccctgttaaggcatccacttcacagttctgaaggctgagtcagccccactccacagttaggccaagaattagattttaaaacttcatctgtctgtcccagttaactgttaaataaggcctcatcctccactgaagagtatggattgaaggattgtgaactatgtttagtgtgattgtgaacttggtgcctaatgttccatgtctgaagtttgccccagtgctacacgttggagtatacctatgtgtgtgctttgccactgaagtaagattttgcctgtatggtactgttttgtttgttaataaagtgcactgccacccccaatgcaaaaaaaaaaaaaaaaaa

SEQ ID NO: 2183 - DNA, 12317 bp, Homo sapiens
gtagcagccgcgccgccgcttcctcccgccggggccccggatgcactgagcggctgcggcgcggcttccatcctcccgccctcctgacgcggccggagcgcagccctgaggcccagggagaacgacacattggatacagaagggaggtgatcatgcaccatggcactggcccccagaacgtccagcatcagctgcagaggtccagggcctgccctggcagcgagggtgaggagcagccggcccaccccaacccacccccgtcccccgcagctcccttcgctccctcagcaagcccgtcggcaccccagtctcccagttatcaaatacagcagctgatgaataggagccctgcaaccgggcagaacgtgaacatcaccctgcagagcgtgggccctgtcgtcgggggaaaccagcagatcacactggccccactgccgctccccagccccacctctccaggcttccagttcagcgctcagcctcggcggtttgagcatgggtctccatcatacattcaggtcacgtcccccttgtcccagcaggtccagacccagagtcccacgcagcccagtccggggccggggcaggccttgcagaatgtgcgtgcaggtgcccctggccctgggctgggcctctgcagcagcagccctacagggggcttcgtggatgccagcgtgctggtgaggcagatcagcttgagcccctccagtggtggacactttgtgtttcaggatgggtcagggctcacccagatcgcccagggagcccaggttcagctccagcacccgggtacgcccatcacagtccgagagcggagaccctcccagccccacacacagtcagggggcaccatccaccacctgggaccccagagccctgcagccgcgggtggggccggcctgcagcccctggccagcccaagccacatcaccacggctaacttgccaccgcagatcagcagcatcatccagggccagctggttcagcagcagcaggtgctgcaggggccgccgctgccccggcccctgggcttcgagaggacacccggcgtgctgctccccggggctgggggcgcagcggggtttgggatgacgtccccacccccgcccaccagcccttccaggactgccgtgcccccaggcctttccagcctcccactcacgtctgtggggaacacgggaatgaagaaggttcccaagaagttagaggagattcccccagcctctccggagatggcacagatgaggaagcagtgcctggactatcattaccaggagatgcaggctctgaaggaggtcttcaaggagtatttgattgaactgtttttcttgcaacactttcaagggaacatgatggatttcttagctttcaagaagaaacattatgccccattacaagcatatcttaggcagaatgatttggacattgaagaagaggaggaggaggaggaagaggaggaagaaaaatctgaggttatcaatgacgagcagcaagccctcgcagggagcctggtagcaggggccggaagcacagtagagacggacctgtttaagaggcagcaggcgatgccctccacaggtatggcagagcagtctaagaggcctcgccttgaagtgggtcaccaaggggtagttttccagcacccaggggcggacgcaggcgttcctctccagcaactaatgccgaccgcacaaggaggaatgccccccacgccgcaggccgcgcagctcgctggacagaggcagagtcagcagcagtatgacccctccacggggcctcccgtgcagaacgctgccagcttgcacaccccactgccgcagctgcccgggaggctgcccccagccggtgttcccactgcagccctctcctctgcgctgcagtttgcacagcagccgcaagtggtagaggcccagacacagctccaaatcccggtgaagactcagcagcccaatgttcccatccctgcaccgcccagcagccaactccccatccctccctcgcagcctgcacagctggccctccacgttcccacacctggaaaggtgcaggtgcaggcctctcagctttcctccctgccacagatggtagcatcgacaaggctccctgtggaccctgccccgccctgcccacggcctctgcccacctcttctacctcgtccctcgcgcctgtgagtggctccggcccaggaccctcccctgctcgatcctctccagtaaatagaccttcctcagccaccaataaggcactatctccagtcacttcccggaccccaggggtggtggcatctgcccccaccaaaccacagagtcctgctcagaatgccacctcgtcccaagacagttctcaggatacgctgacagaacaaataactctggagaaccaggtgcatcagcgcattgcggagctgaggaaagcaggtctgtggtcccagaggcgtctgccaaagctgcaggaggccccacgccccaagtcccactgggactatctgctggaggagatgcagtggatggccacagactttgcccaggagaggaggtggaaggtggctgctgcgaagaagctcgttagaactgtggtgcgccatcacgaggagaagcagctccgtgaagaaagggggaagaaggaagagcagagcagactgaggcggatagccgcctccacggcccgggagatagagtgcttttggtcgaatattgaacaggttgtggaaataaaactacgagtagaattagaagaaaaaaggaagaaggccttaaatttacagaaagtttccaggagagggaaagaattgagacctaaaggatttgacgcattacaggaaagttctctggattcaggaatgtctggaagaaaaagaaaagctagcatatctttgactgatgacgaagtggacgatgaagaggaaacaattgaagaggaggaagcaaatgaaggcgttgtggaccaccaaacagaactttctaatttagccaaggaagctgagctgcccctcctggacctgatgaagctgtacgaaggcgccttcctgccgagttctcagtggccccggccgaagcctgatggggaggacacaagcggagaggaagatgcagatgactgtccaggcgacagggagagtcgcaaggacttggttctcatcgactcgcttttcatcatggatcagttcaaagctgccgagaggatgaatatcgggaagccaaacgccaaggacattgcggacgtcactgcggtggctgaagccatcctgccgaagggcagtgctcgggtcacaacctcggtcaagtttaatgctccatctttgttgtatggggctctcagagattatcagaagattggcctggactggctggccaaactttacaggaagaatctcaatggcatattggcagatgaagctgggctgggtaaaacagtgcagatcattgctttttttgcccacctagcttgtaacgaaggtaattggggcccccatcttgttgttgtgagaagttgtaacatactcaagtgggagcttgaattgaaacgttggtgtcccggactcaaaatcctctcatatattggcagccacagagaactcaaagcaaagagacaggagtgggccgaacccaacagcttccacgtctgcatcacgtcctacactcagttcttccggggcctcaccgccttcacacgagtgcgctggaagtgcctggtcattgatgagatgcagcgcgtgaagggcatgaccgagaggcactgggaagcggttttcaccctgcagagccaacaacgtctgcttctgatcgactcgccgctgcacaataccttcctggagctctggaccatggtgcacttcctggtcccagggatctccaggccctacctgagctcccctctgagggcccccagtgaagagagccaggattactaccataaagtggtcataaggttacacagggtgacacagccatttattttgaggagaactaagagagatgtggaaaagcaactaacaaagaaatatgagcatgttttgaagtgtcgcctttctaaccgacaaaaagccttatacgaggacgttatcctgcaacctggcactcaggaggccttgaagagcgggcactttgtcaacgtcctgagcatccttgtgcggctgcagcgcatctgcaaccaccctgggctcgtcgagccccggcacccaggctcttcctacgtggcggggccactggagtatccgtccgcatctctaatcctgaaggcactggagagagatttctggaaggaagcagatctttctatgtttgatctcatcggcttagaaaataaaatcactcgtcacgaggcagagttgctgtctaagaaaaagataccgcggaaactcatggaggaaatctccacttcagcagccccagcagcccgaccagcagcagcaaagctgaaggccagcaggttgtttcagcctgtgcagtatggccagaagcccgagggtcgcaccgtggctttccccagcactcacccgccccggacggcagcccccaccacggcctctgctgctccacagggcccgcttcgaggacggccgcccatcgccacgttctctgccaatccggaggcaaaagcagcagcagccccgtttcagacctctcaggcttccgccagtgctccacgacaccagcccgcctcggcctccagcacagccgctagcccggcccatcctgcgaaactgcgggcccagaccacagcacaggcctccaccccaggccagcccccgccccagccccaggccccctcgcacgcggccgggcagagcgcgctgcctcagaggctggtgctcccctcgcaggcccaggcccgcttgcccagtggagaggtagtgaaaatagctcagctggcatccatcacaggaccacagagccgcgtggctcagccagagacgccggtgacactgcagttccagggcagcaagttcaccctgtcacacagccagctccggcagctcacagcgggccagccgctgcagctgcaaggcagcgtcctccagatcgtgtccgcccccgggcagccctaccttcgagcccctggccctgtggtgatgcagaccgtgtctcaggcgggcgctgtgcacggcgccctgggaagcaagcccccggccggcggtcccagccctgcacccttgaccccacaagttggcgttccgggccgcgtggcggtgaatgccttggctgtaggagaacccggaacggcctccaaaccagcttctcccattggagggccgacccaggaggaaaagaccagactcttgaaagagcgcctggatcagatttatttagtcaacgagcggcgctgttctcaagctccagtctatggcagagacttgctaaggatttgtgccctgcctagccatggaagggtacagtggcgtgggtccctggatggccgtcgtgggaaggaggccgggccagcgcacagttacacttcatcctcagaaagtccaagtgagctgatgttgacgctttgtcggtgtggagagtctctgcaggatgttattgacagggtggcctttgtgattcctccggtggtggcagcacccccgtccctacgggtgccgcggccgccacccctgtacagccacagaatgaggatcttgaggcagggcctgagagagcacgctgcgccgtacttccagcagctgcggcagaccacggctccacgcctgctgcagttccctgagctgaggctggtgcagttcgactcagggaagttggaagctttagctatcttgcttcagaaattgaaatctgaaggacgtcgggtgctgattttatcacagatgattcttatgttggacattttagagatgttcttgaacttccattacctcacctatgtaagaatcgatgaaaatgccagcagtgagcaacggcaggaactgatgaggagtttcaacagagacaggcggattttttgtgccattctctccactcacagccgtaccacaggtataaaccttgtagaggcggacaccgtcgtgttttatgacaatgacctgaatccagtgatggatgccaaagctcaggagtggtgcgataggatcgggagatgcaaagacatccacatatacaggcttgtgagtggcaattccattgaagagaaattgttgaaaaatggaactaaagatctgatccgagaagtggctgctcagggaaatgactactccatggctttcttaactcagcgaaccatccaggagctgtttgaagtttattctcccatggatgatgctggcttcccggtcaaagctgaggagtttgtggtgctttctcaggaaccttctgtcacggaaaccattgcacccaaaattgcaagacctttcatagaggccctcaagagtattgagtatctggaggaggatgcccagaagtccgcacaggagggggtgctgggaccacacactgatgctctgtcatcagactctgagaacatgccgtgtgatgaagaaccatcccaattagaggagctagctgacttcatggagcagcttacaccaattgaaaaatatgctttaaattacctggaattattccatacttctattgagcaagaaaaggagagaaacagtgaggacgcagtgatgactgcagtgagggcatgggagttctggaacctgaagaccctgcaggagagggaggcccggctgcggctggagcaggaggaggcggagctcctgacctacacgcgagaggatgcctacagcatggagtatgtctacgaagatgtcgatgggcagacagaagtcatgccgctctggaccccacccaccccgccgcaggacgacagcgacatctacctcgactcggtcatgtgtctcatgtatgaagccactcccatcccagaggctaagctgccccctgtgtacgtgaggaaggagcggaagcgacacaaaacagacccctcagctgcaggcaggaagaagaagcagcgtcacggggaggcggtcgtccctcctcggtccctgtttgaccgcgcaacaccaggacttctgaaaattcgcagagagggcaaggagcagaagaagaatattctgctgaagcagcaggtgccattcgccaagcccctgccaacttttgccaaacccacagctgagcctggtcaagacaaccccgagtggctcatcagtgaggactgggcgctgctgcaggctgtaaagcagttactggagctgcctttgaacctcacaatcgtgtcacctgctcacacacctaattgggatcttgtcagtgacgttgttaactcctgtagccgaatctaccgctcttccaaacagtgccggaatcgctacgagaatgtcatcattccacgagaggaggggaagagtaaaaacaaccgtcctctccgtacgagccagatctatgcccaggatgagaatgccacacacacccagctgtacacgagccactttgacttaatgaaaatgactgctggcaagaggagtcccccaatcaaacctctgcttggcatgaatccctttcagaagaaccccaagcacgcgtctgtgttggcagaaagtggaatcaactatgacaagccgctgcctcccatccaggtggcatctctccgtgcagagcgaatcgcaaaagagaaaaaggctctggctgatcagcagaaggcacagcagccggccgtggcccagccacccccgccccagccgcagcccccaccacccccgcagcagccaccgccaccgctgccacaaccacaggcagcgggcagccagccgccagcagggccaccagctgtccagccccaaccccagccacagccccagacccagccacagcctgtgcaggccccagcgaaggcgcagcccgcaatcacgacggggggcagtgcagccgtactggcaggaaccattaaaacatcagttactgggacgagcatgcccactggtgccgtgagtggaaatgtgatcgtgaacaccatcgcaggggtcccagctgccaccttccagtccatcaacaagcgcctggcgtcgccagtggctcctggggccttgactacgccgggaggctctgctcccgcccaggtggtgcacacccagcccccgccacgggcagtcggctccccagccacggcgacccctgacctggtgtccatggcaacgactcagggtgttcgagcggtcacttctgtgacagcctcggccgtggtcactaccaacctgaccccagtgcagaccccggcacggtctttggtgccccaagtgtcccaagccacaggagttcagctccctggaaaaaccatcacacctgcacatttccagcttctcaggcagcagcagcagcagcagcaacaacagcagcagcagcagcagcagcagcagcagcagcagcagcagcaacagcagcagcagcaacagacgacgacgacctctcaggtgcaagttccacagatccagggccaggcccagtccccagcacagatcaaagctgtgggcaagctgacgccggaacacctcatcaaaatgcagaagcagaaactgcagatgcccccgcagcccccaccgccacaggcccagtctgcgcccccgcagccaacagcccaagtgcaagtgcagacctcgcagccgccgcagcagcagagcccccagctcacgacggtcacggccccaaggcctggtgccctgctgacgggcaccaccgtggccaacctccaggtggcccggctcacccgggttcccacttctcagctgcaggcgcaagggcagatgcagacccaggcaccccagccagcccaggtggccttggcgaagcctccggtggtgtccgtcccggcagctgtggtctcctcaccgggagtcaccaccctgcccatgaacgtcgcggggatcagcgtggcgatcggtcagccacagaaggcagcaggacagaccgtggtggcccagcccgtgcacatgcagcagctgctgaagctgaagcagcaggccgtccagcagcagaaggccatccagccccaggctgcacagggcccggcagccgtccagcagaagatcaccgcacagcagatcaccacccctggcgcgcagcagaaggttgcctacgccgcgcagccggcccttaagacccagtttcttaccacacccatctcccaggcccagaaactggccggggcccagcaagtgcagacccagatccaggttgcaaaacttcctcaagttgttcaacagcaaacacccgtggccagcatccagcaagttgcctctgcttcccagcaggcttctccacagactgtggcgctcacgcaggcgacggcggccgggcagcaggtgcagatgatccctgcagtgaccgcgactgcccaggtggttcagcagaaactcattcagcagcaggtggtgaccacggcgtcggccccgctccagactccaggcgctcccaacccagcccaggtgcccgccagctccgacagcccaagccagcagcccaagttacagatgagggtccctgctgtcaggctaaagacacctactaagcctccgtgccagtagtcagggcagcagggctgcctctcatctaaagcaaaactaccttcctcacagaaaacgctttattagtgaaccttgggaccatgtcacgcaagagattcagcactgggaaagatataattgaaacaaaatagtgtaatcattttattaaaatgcatcccacactgcaggacaaatggtccttatggagtgccgcgttctctgtactacgtggctcatggaaaaagtgacaacatggcttcctctaaatcatttcacctttcagtccccacccgcacccgtcccctagagccatagtactgtgttctgaaagccatttagaatttctttgtgagcatgtagtgctttgcacgccacagaagccgtctgccgtgtgtgaggagcatacaatggactttctaaagataaggcgtgggcttccacagtgtctgccagagtttagttctttataccttactgaaaaatgcctcgtggtcttcgcagaggggaaggcctgtctaaagtcaatcatccgagatgggttttccattccaaagaaaggcaatatggttccttccttccctcctaaaatatgacttaacttttaagagaaatgttctgacacccacctaaacacacaaggcacgttcctggcctgtgttcaagggaaatgatcagtcattgcattgttattccaaagagcagccaacagtggcctcccccaggccctaccctgcaatgggattcgctttcatttaatggaaacttctgggactgatgcccaactcagtgcactcaagacgcatctccagttttcgggggaagctggtatttgacatagtgtgttaaacagctcctgagaacctttgggacactctgccatggctggcgtgaggcccagaggaccacgcagaggcaatggtagtacagatgtcacagctgagggtacgatgaggcctgggctcagtgagccaggacgaatgtgacagacaccccttgctgccacagtcagccctttgacgaaggtgggctggtgattctggaagtattggctatagcggtgggcccagtcaactcttccttgtggacttacgacagcagattttctctaggataagcttgtgtggttctgccagtgaagcagagaaccacctgtgctgttgtggaaggcgtgccgttgagggggaaaacgaagcccagtatttgctactgtttttcctttttttactatgacaggaaaataaatgcaattttagtggaattgattgacagtgtctccttactttgaagttttcaccaaagcaaaaaggtccatatccaatagtatcctttgtgctgtggcttgattttggcctattttacattatttggtccaggaaattaggttatattaggttttttgtatactaaaaatcagttatggcacaataaagattttctgtttttaaattgtatttcatctgcttcctccccattctctcactttaagtgacattgaggaaggtattctgtcccacaggtttctgtggacagcgatacagcaggagtcagtgaaatcaactggggagctcacttgagctcttgataagaaatgtggagaaaagtaaaaaccaagctttgaagaaacagaagaaattaatcttttagttagttgaacataccaaagcagaggactggaatctgtttgttctaaccaacccgttctccctggcttggcacgtgccgtgagagcgcagcttgccggagggagggccgctgtgtgcgcctcacatctggctcccagtggaaacttttactcctcctcatccgcagatgtgatagaactgaagtatctaggaattctgcctttgtcatttgttttaatttgtgtgccctgttcattttttttgtctttcccaaatcttggtagtctccttatagttgaagataaaatgttgagtgcacttattttagaatatcctagacataactgtctaagtaaaagcgctctattaatctaaaacactacaagagaatttaacaccatctctcaaatgcttttttggagagcttaatgggattctgaatatttgcaatgtggagtttccgccccgatctcacgtcagtgagggtctcctgtctctcaagtgtgtttcctttggctgttccctaatacaaaacacggacatatttttactcgtagcactcaatttagtaacttctagatgctaccgttgacctgagttaaattcatttagtcgtgtacgtaaaaactctccttttagtgtgttattttcttggccttcccttttaaaggttaaagtttctaacctaagaattaagtacgcgttcaggaagctgttgtctaggccttccccttgtgaatctgggttcattccaatacggcaagtaagagttggaaactttgagaacacagactataaaggcagcagcccgaacactgtcagactctaattggcgaccctgggaaacagttgccctgctattctttaaagaaagacgtttattctgatgataaaaacagttagccagactgtttttaaagcacctggcgggaagcagaaggttggatccaagcccttgttcagatttggtgcctgataagacaggggtttctctttttgtgacctttattattattattttgttaactgttgtaaccagttagctgttgtgttttaagatagaaaggaacaagactaaaattgtaaatactttgtaaacatcagcatttgtacttgaatagtaggattttaaagggcattgatagcataccaaacaaaaggcaaaataaagtgacctttttatatatttttt

SEQ ID NO: 2184 - DNA, 3705 bp, Homo sapiens; identical to SEQ ID NO: 2045

SEQ ID NO: 2185 - DNA, 10389 bp, Homo sapiens
atgaccaatgggtctgtgttttggaccggcgaagcccaatggcgcgacagggaaggcgggcccgagatgggttagggtgtccttgcagggtgtctgagctaaacttcaccaaataatagctgtttgtattttggctgctgcaggagccattttagaaataaatatcttccttcaatagatgaaaatgaaaatacagaaaaaagagaagcagttgtcaaatttaaaagttttgaatcactccccaatgtctgatgcctctgtcaattttgactacaaatctccatccccatttgactgcagcactgatcaagaagagaaaattgaagatgttgctagtcactgtctgcctcagaaggacctgtatactgctgaagaggaagctgctaccctttttcctaggaaaatgacatcccataatgggatggaggacagtggaggaggaggtactggagtgaagaagaaacggaagaaaaaggagccaggagaccaagagggtgcagcaaagggaagcaaggacagagagcccaagccaaagaggaaacgagaaccgaaagagccaaaggaacccagaaaggccaaggagccgaagaaggccaaggagcacaaggagccgaagcaaaaagatggggcaaagaaggcacggaagccccgggaggcctcgggcaccaaggaggccaaagagaagaggagctgcactgactctgcagccaggacgaagtccaggaaggccagcaaggagcaaggaccaaccccagtggagaaaaagaagaaaggaaaaaggaaaagtgaaactacagtggagagtttagagctggatcagggcctgacgaacccatctctgcggagtcctgaggagtccactgagtctacagacagccagaaacgacgctcgggaaggcaagtaaagcgcagaaaatacaatgaggacctggacttcaaagtggtggatgatgatggggaaacaattgctgttcttggagctggtcgaacatctgcactctcagcctctacactggcctggcaggcggaggagcctccagaagatgatgcaaacatcattgagaagatcctggcatctaagactgtccaggaggttcacccaggagaacctccgttcgacttggagctgttctacgttaagtatagaaatttttcctacttacattgtaaatgggccacaatggaagagctcgaaaaggatcctcgcatcgcacagaagatcaagcgatttaggaataaacaagcccagatgaagcacatttttacggagcctgatgaagacttgttcaatccagactatgtagaagttgatcgcatcttggaggtggcccacaccaaggatgcagaaacaggggaggaggtaacacattacctggtgaagtggtgctcactaccatatgaagaaagcacgtgggagctagaggaagatgtagatcctgcaaaagttaaagaatttgaatctcttcaagttctccctgaaattaagcatgtggagcggcctgcttcagactcctggcagaaacttgagaagtctcgcgagtataagaacagtaaccagctccgggagtaccagctggaagggatgaactggcttctttttaactggtataacagaaaaaactgtattttggctgatgagatgggcctagggaaaaccatccagtccatcacattcctttcagaaatatttctgagaggaatccacggcccttttctcattatcgcccctctctccaccatcactaactgggagcgggagttccggacatggacagagatgaatgccattgtgtaccacggcagccagatcagcaggcagatgatccagcagtatgaaatggtgtacagagacgcccagggaaaccccctttcaggagtcttcaagttccacgtcgtcatcacaacatttgaaatgatcctagcagactgcccagagttgaagaagattcactggagctgtgtgataattgatgaagcccacagactgaagaataggaactgcaaacttctggagggtctaaagcttatggccctggaacataaagtgcttctcactggaacacccttgcagaactctgtggaggagctcttcagtttgttaaattttctggagccatcacagtttccttcagagaccgctttcttggaggaatttggagatctgaaaacagaggagcaggtaaagaaactgcagtctatcctaaaaccaatgatgcttcggcggctgaaagatgatgtggaaaagaaccttgctcccaaacaagagacgatcattgaggtggaactgaccaatatccagaaaaagtactaccgtgccatcctcgagaagaacttttccttcctgaccaagggggcaaatcagcacaacatgcccaatctcatcaacaccatgatggagctgaggaagtgctgtaaccatccctacctgatcaatggagcagaggagaaaattctagaagatttccgaaaaacccacagccctgatgcccctgactttcagctgcaggccatgattcaggcagcaggaaagcttgtgttgattgataaactactccctaagctgattgcaggtggccacaaagtactcatcttctcccagatggtgcgctgcctcgacatcctagaagattacctcatccagagaagatacacctatgagcgaattgatgggcgagtacggggaaacctgcgccaggcagccatcgaccggttctgtaagccagattcagaccgctttgtctttcttctgtgcaccagagcgggaggcctggggatcaatctcacagctgctgatacctgcatcatatttgattctgactggaacccacaaaatgacttgcaggctcaggcccgatgtcaccgcataggccagagcaaagctgtgaaggtgtatcgcctcatcactcgaaattcctacgagcgcgagatgtttgacaaggccagcctaaagctggggctggacaaggctgttcttcaggacatcaaccgaaagggcggcaccaatggggtacagcagctctcaaaaatggaggtggaggacctactccggaaaggtgcttatggagccttaatggatgaagaagatgaaggctccaagttctgtgaagaagacatagaccagattctgcagaggcgaacgcacaccatcaccatccagtctgaggggaaagggtccacttttgccaaggctagctttgtggcttcaggaaacagaacagatatttccttagatgatcctaacttttggcagaaatgggctaaaatagctgaactagacactgaagcaaagaatgaaaaggaaagcttagtgatcgaccgacctcgcgtgagaaagcagaccaaacactacaactcgtttgaggaagacgagctcatggagttttcagagttagacagcgactcagacgaaaggcccacgagatccaggcgcctcaatgacaaagccaggcgctacctccgagcggagtgcttccgggtagagaagaacctgctcatctttggctggggccggtggaaggacatcctgactcatggccgattcaagtggcatctgaacgagaaggacatggagatgatttgccgtgccctcctggtgtactgtgtcaagcattataagggggacgagaagatcaagagtttcatttgggaactgatcacacctaccaaagatgggcaagcccagaccctccagaaccactcaggcttatctgccccagtccccagagggaggaaggggaagaagacgaagaaccagttgctaatcccagagctaaaggatgcagattggctagccacctgcaaccccgaggtggtcttgcatgatgatggctataagaaacacctcaaacagcactgcaacaaagtacttttgcgagtccggatgctgtactacctaaaagctgaaatactgggagaagcagctgagaaagcatttgaaggatctcctgccagggagctggatgtacctctgcctgacatcgactacatggagatcccagtggactggtgggatgctgaagccgataagtcacttctcattggcgtgttcaagcatggttatgaaaggtacaatgccatgcgagcagacccagcactttgcttcctggagaaagttgggatgcccgatgagaagtccctttctgcagaacagggtgttacagatgggacctcagacattcctgaaagaggcaacacagataaagaagacaatgctgaggacaaagtagatggcctccagaaacaaacggagagttccagtgatggaggtgatggcgtttttagcgaaaagaaggatgacagccgggcagcccaggatggctccgacccagacaaatcgccctggccagtttcctccgccctcacagctcgtctcagacgtctggtcactgtttaccagcgctgcaaccgcaaggaactgtgccggcctgaaattctgggaccaggtaaccaaggatattgggttcaggaagagatgttcaggagaacctcagaaatggacctcatcaacaaggaagcccaaaagaggtggactaggagagaacaagcagacttctatagaacagtgtcttcctttggtgttgtttacgatcaagaaaagaaaacctttgactggacacagttccgcatcatttcccgtttggacaagaagtcggatgagagcctggaacagtatttttatagttttgtggccatgtgccggaatgtctgtcgtctacccacatggaaagatggcggtcccccagataccaccatctacgttgaacccatcactgaggaacgtgctgcaagaactctgtaccgcattgaactgttacggaaagtccgagagcaagtgctcaagtgccctcagctgcatgaacgcctccagctgtgcaggcccagcctctacctcccagtctggtgggagtgtgggaagcatgatcgagacctgctcatcggcactgccaaacatgggctgaaccgcactgactgttacatcatgaacgacccccagctgtccttcctggatgcctatagaaactatgcccagcataaaagatctggcacccaggcaccaggaaatctctgttgcctttaccagaccaactccaagttatatgaatctcttacatattctcaaatgagtaggacttcagagtcccttgaaaatgaacctgaaaatctagtgagagtagaaagcagagatgatcatctcagcctgcctgatgtgacatgtgaaaactttatttctaaagttcaggatgtcatttccatcaaccatgatgaaagtctgctgcctgagtccttagagagcatgatgtatggtaagaaggtgctcagccaagaaccaagctcttttcaggagagcccaagtaccaatactgaatctagaaaagatgttattaccatctcaataagcaaagatgggaactgccagtctggtggccctgaggcagaaatagcttctggccctacttttatgggtagcttagaagcaggaggagtagctcaagcaaacatcaaaaatggaaaacatttgttgatgtctatttcaaaggaaggggagctctgctgcagtgaggcaggacagagacctgaaaacattggccagctggaagccaagtgtttagcttccccttccttgaatccaggaaatgaaagtgggtttgtagatatgtgcagtcttagtgtctgtgactccaaaagaaacctgtcatcagatcagcaattaattgatttattggaaaacaaaagcttagaaagtaaattgattttgagtcagaaccacagtgatgaggaggaagaagaggaggaaaacgaggaggaaaacttagccatggcagtaggcatgggggaaaggccagaggtattgcatctcacggagcccactactaacatctcaagggaaaagaaccaaggcttccaagatgaaaccaagaaaggaagcttagaggtggcaaaccagactcctgggctacagagggctttccccgctccagcagcctgtcagtgccactgcaaacacatggagaggtggatgcatggcctcgagaatgatgaatttgaaatcgagaaacccaaggcttatatcccagatctgttcaaaagtaaaaccaatactatcgccatggagggtgaacccactgctattccatcacagccgtttaaagtgaagcatgagcttttaaaagaaccttggaaagaaagtgcagaggggcaaaacgttttccccacatatcctcttgaaggaagtgagctcaaatcagaagacatggattttgagaataaagatgattatgatagagacggaaactgccatagtcaagattatccagggaagtactctgaagaggagagcaagagctcaacatcgggcatcacaggagacattggggatgagctacaggaggctcgagctcccactattgctcagctgctacaggagaaaactctctattccttctctgagtggccaaaggaccgcgtgataattaaccgcctagataatatctgccacgtggtgttaaaggggaagtggccctctagccagcagtatgagccctcaggcacactgcccaccccggtattaaccagcagtgctggttctcgaaccagcctctcagagccggaagcagcagaacacagcttcagcaacggcgcagcattggcggcccagatccacaaggagagcttcttagctccagtattcacaaaggatgaacaaaagcacaggcgtccctatgagtttgaggtggagagggatgcaaaggctcggggcctggagcagttctctgccacccacgggcacacccctatcatcctcaatggctggcatggggagtcagctatggacctctcctgctcatcagaggggtccccaggagccacatcccctttcccagtgagcgccagcacccctaagattggggctatcagttcacttcagggagcccttggcatggacttgtctgggattctgcaagctggcctgatccatcctgtgactggacagattgtcaatggaagcctcagaagagatgatgcagccacgaggaggcggagagggaggcggaaacatgttgaaggagggatggacctcatctttttgaaggagcagacacttcaggcgggaatcttggaagtccatgaagacccagggcaggccaccttgagcaccacacaccctgaggggccagggcctgccacctcggctcctgagccagctacggcagccagcagccaagccgagaaatccattcccagcaagagtctgcttgactggctaaggcagcaggctgactactccttagaagttcctggctttggggcaaatttttcagacaaaccaaagcagaggaggccacgctgtaaagaacctggaaaattagatgtcagctccctgagcggggaagagagagttcctgccatccccaaggagccaggactgagggggtttcttccagaaaacaagttcaatcacactctggctgagcctattcttcgagatacgggcccccgcaggagggggaggcggcctcggagcgaactcctgaaggctccttccattgtggcagactctccctctggaatggggccactgttcatgaatggactgattgctgggatggacctggtaggacttcagaacatgagaaatatgccaggcatccccctcaccgggctggtggggtttccagctggctttgccacgatgccaacaggtgaagaggtcaaaagtaccctgagcatgctgcccatgatgctgccaggcatggctgctgtgccccagatgtttggtgttgggggactcctcagtccacccatggcaaccacctgcacttccactgctccggcgtctctatcaagcacaacgaaaagtggtacggcagtgactgaaaagactgcggaagacaagccgagtagccatgatgtgaaaacagacactttagctgaggacaagcctggtccaggtccattttctgatcagtctgaacctgcaataactactagtagtcctgtggcttttaacccatttctcatcccaggagtatctcctggactcatttacccatccatgttcctctcccctggtatgggcatggctctgccagccatgcagcaggccagacactcggaaatagtaggtctggagagccagaagaggaagaagaagaagacaaagggggacaaccccaactcccacccagagcctgctcccagctgtgaaagggagcccagcggtgatgagaactgtgccgaacccagtgcccctttgcccgcagagagagaacatggggcacaggctggggagggggcactcaaagactccaacaacgacaccaattagaacttttttcatttaagaaattattgtgacttgtaagtttcttatcccataaaggtttgttacttccctcacttcacctccataagaacctgtgtttccataagtaagattacgtacctgatttcctgtctgagaactatggtaacagatgttaatagttgcagggtctcaccacttcattagataagtgttgtctacctagtctaggaggcacagaattctcattctgttatccagttcattccagcaatcatagttaatacagtacttggtgacacgccctacccccttctcttccaagtttcccactcacttgaggaggaaaaatggcaaaagaaagctgtctagggttttaccattgaagggtggaagaacagagacaaagaggagctctttttctgtgagctgggttgcacaggaagaatgtcacagggaaccaaaaagcacagaaaaaggaagtgctggtgcatatttttgagttaaaatatttccctattttatcatgattactaagtgagtagtatagacagaagtatataactaatggttgaaaatacatatattcatttctttataaaaaacaaaaaccttaccggtagtaatataatttcccccttggtggtttttcagacacctgcagcaagaagaaatactgactgactaggcattattttctatacatccctctcaccagtgaaaagattcctcttgctgcgagaaagctttacccaccatgagttattgctgtcgacgggggtggggcaaggacccgcgctccgtagagctacacgctgcttcacaagcacacggctagcgctctgctctcacctggttcgcttacagatttctctagccattaatttgcctctctgtgtttaaagagcaccaggaccgaatggattttcacttcaggctttccttcaccaagaataaggttctttctggagcctgcaagaagacagttgcccaacactttgacacttgctagtaggtcctttgatcaagagtgtctgaggctgtcaaatgtgtgccaccctttataatacagctatgaaaagttacttctccattaatttctccattctgtttatatcttacagttggacccaaattccaaattatcagttaatcgaaactacattgcaagtcaacattattttctcttcttcctcagcttctccatgtttaggaactgagaaagaacctgcctaagcagcacttccccatgtcctttcaccttcatgttaacgtcccttctgatggtctcactcttcacaggtagttcacactctgagacttgaagtaagctcatggttcagtactctgggggcgcagggctgcgcaggacccttggaaatgttgcaagtgttactagtaccagtttcactttttgttgtcacaatttactgtattttttactttttctgttacagttttgctaatttatcagaaggtccaaaagtctgacataactatttcattttgcattatttatttatgatgcttttttcattgtcttttatacatttgggattataaattatgtaaatgttaaaatgagcatctcaaagaagtctgttaaatcatgactgaaaaaaatcaatcagatgtatcttcaaaaagtggagtcccagttttatgaatcagagatataaaccagaaattctataactgatcatagaagaagaatccagtaattgaacaaatcctatttaatgacatccttgtagcatagatggtctataatgctgaccacagatttcttagaaatgctgctctctctatttaactaacattttgttcagttttgcctccagtggaagcagaaagggttttttcagctgttaaatcctaaaaatcaatataatttatttatgtaagaaaaataactcaatcaatatatttttgaaccttttaagtactaattttctttttatcaagtagaaaaaaaaatgtatttgccctaaatccttaaaatacaaatgctataaaaattcctgtatcttgaaagccttactgcaaatgagtattatagacatccagcagagtctggttttctttgt

SEQ ID NO: 2186 - DNA, 6329 bp, Homo sapiens; identical to SEQ ID NO: 805

SEQ ID NO: 2187 - DNA, 3768 bp, Homo sapiens
gaagacgtggcttggggccgccatcttggcaagaggcgaagcggcagcggttcctgtcaagggggcagcaggtccagagctgctggtgctcccgttccccagaccctacccctatccccagtggagccggagtgcgggcgcgccccaccaccgccctcaccatgatccctgaatattgccgagccttagaagagaatgaaatatctgagcactgttttgatttgatttttgcttttgatgaaattgtcgcactgggataccgggagaatgttaacttggcacagatcagaaccttcacagaaatggattctcatgaggagaaggtgttcagagccgtcagagagactcaagaacgtgaagctaaggctgagatgcgtcgtaaagcaaaggaattacaacaggcccgaagagatgcagagagacagggcaaaaaagcaccaggatttggcggatttggcagctctgcagtatctggaggcagcacagctgccatgatcacagagaccatcattgaaactgataaaccaaaagtggcacctgcaccagccaggccttcaggccccagcaaggctttaaaacttggagccaaaggaaaggaagtagataactttgtggacaaattaaaatctgaaggtgaaaccatcatgtcctctagtatgggcaagcgtacttctgaagcaaccaaaatgcatgctccacccattaatatggaaagtgtacatatgaagattgaagaaaagataacattaacctgtggacgagacggaggattacagaatatggagttgcatggcatgatcatgcttaggatctcagatgacaagtatggccgaattcgtcttcatgtggaaaatgaagataagaaaggggtgcagctacagacccatccaaatgtggataaaaaacttttcactgcagagtctctaattggcctgaagaatccagagaagtcatttccagtcaacagtgacgtaggggtgctaaagtggagactacaaaccacagaggaatcttttattccactgacaattaattgctggccctcggagagtggaaatggctgtgatgtcaacatagaatatgagctacaagaagataatttagaactgaatgatgtggttatcaccatcccactcccgtctggtgtcggcgcgcctgttatcggtgagatcgatggggagtatcgacatgacagtcgacgaaataccctggagtggtgcctgcctgtgattgatgccaaaaataagagtggcagcctggagtttagcattgctgggcagcccaatgacttcttccctgttcaagtttcctttgtctccaagaaaaattactgtaacatacaggttaccaaagtgacccaggtagatggaaacagccccgtcaggttttccacagagaccactttcctagtggataagtatgaaattctgtaataccaagaagagggagctgaaaaggaaaattttcagattaataaagaagacgccaatgatggctgaagagtttttcccagatttacaagccactggagaccccttttttctgatacaatgcacgattctctgcgcgcaaggaccctcgactcacccccatgtttcagtgtcacagagacattctttgataaggaaatggcacaaacataaagggaaaggctgctaattttctttggcagattgtattggccagcaggaaagcaagctctccagagaatgcccccagttaaatacctcctctacctttacctaagttgctcctttatttttattttattattattattattattattattattttttgagatggagtctcactttgtaacccaggctggaatgcaatggcatgatctcagctcactgcaacctccgcctcctgggttcaagcaagtctcctgcctcagcctccgagtagctgggactacaggtgcacgccaccacgcctggctaattttttgtattttagtagagacggggtttcaccgtgttgcccaggctggtcgcgaactcctgagctcaggcaatccgcccacctcagcctcccaaagtgttgggattacaggcatgagccaccatgcccagctgctcctttattttaatccctaaatataatccctaaatatagttatatttcatacttagtttgtttttaaaaagttttctctgtagaaaattttaatcattcataccctttacctttaggtttttctttctatacattcagtcaggcactgggatcatctgtttacaggcattatatttatttggcactcctggaacaagtatatctaacccattcttgatttttggactattcaggtgaactatttgaggggtatggggtctagaagttaaaagatacgcatgtcttctgttcttttcccgtatcaattcattccttcatctctttgccaagttgttttcctttcagggcctgtccttccagtttagaacagtaccatgaatcccacttgtgtcaatattaaagatagctgagaagcacctttcaaatggcacagtccctcttcaagatgtctaaaagaatggttatgtctgtccagttagggatttcacatccacatgtaatcatgtctgctgctgttgctacccaaattttcatttctccacattttgggtacttaagctaaaacgtaatggccacagtctgtaatccattcacattcctcagtttcaccacctccctcttccagactgcactctctgtcatcagtcccctcctttctaacagaaatggggttatgattttgaaggctgtgggttcagggagtctttgccaatcctgttggccctaaactatcaaggaggctccatttcaccatttgattttttgcatttcaggaggcaactgattgtttcgatatgtacatattactcacgtataccccatttccttccagtcagcccaacattttccaccagtctgtccccatctctgaaatccttccttctctttccccctaagtcttttgagtgtcatcatgtactggtggtttctcggttccatctcatccatttccttttcaatggagactacagcgtcagccagctcagccttggcttttaactcaatattccagtccataggggtggttaaaagttgctgcaaggctgcaggcactggcagtgggaagaggcagacgactagatgacttctgcacttttagctggttgaaaagtaccactcccactctgaacatctggccgtccctgcaaagagtgtactgtgcttgaagcagagcactcacacataaatggctgtgtgtggaattgcttgccaaagaagtttctagcctttccctttcccctaactgcatcagggaagaattcttatctctagcttggtttccacatgaggtttttctgagaagggcttgggacaagaagtctgtcatgttagttaagcaggcaagaaatcctactaatccagttttgtttgaaagttgtttgtccgtatgattttttaaaagtcaagtttaatttcaaaaaaccttttttttctgagattacttttggggtaatatttaaaatgagagacattttgtaaccctgtaaaatacatagggaatataacattccagtgtatacaaagaaggcaaattctttaatcaaataaagcgcattataaaatgagatgtttattggattattgactcactttggtgtctgcttgttgattcaggatgctgtaatgggacctaacattaaaaattaatgacatgttttttttaagagaaaaaaaaaaaaaaaaaaa

SEQ ID NO: 2188 - DNA, 3359 bp, Homo sapiens
gtcgcaaggggcgggcctgacgcagcctcctccctgcccggccgtcgccaggcaaccttcccccttcgcggccgagatggaccctgggctcggcgtcctccggaaaactgcactgtgaggcggggcgatggggaagggccgaagccccgccagcccagctaaagcagacggctcgcactgcgacccgaagcgcgagtcatggctggggccttagtggcaacaagtgctgagatcagcgggctcagtagcaggaacacaagcacccccttgcggtgtctggaggaagcggcgcggacagtctcccgctccaccgtgtcgggcctgaagaggccgctgaacgctcgcgattactgaggcatctggtaggatcgcaaggccatcaacctacaggtgaagctcgaggcgctgtggcgctttgaagccggagagaagctcagtagaatcgggaaggcgctggggctgtccaactccaccttggccaccattcgtgacaacaaggaaaagatctgggcgagttcccaggaggccacactgcaggcggccaccaagttgacgcgtggccgcagcctggtgatggagaacatggagcagctgctgagcatgcggatggaggaccagagccagcgcaacatgcccctcagtgtggtgctcattcgggagaaagcccacagcccgttcgagaaccgcaagcaggagcagggcgagggcgcctagcccgagagcttcggggccggtcgagggtgattcgctggctttaaggcgcgccacagcttgagcagcatcggggccagcggcccaagaacgcagcgtgcaagaatccagcgttaatgcgcagggtgatcccggagggcggctacacactctggctggtgttcaccatgaataagctctggctggtgttcaccatgaataagcccaggttcctctgtaagcgcctgccgagaggacgttcattttcctgtggaagatgagtcggcccctgggtcaaagccgccggagacctcctgaccctattgctcggtggcaacgcagccggcgacttcaagctgaaggccctgctggggtacccctcggagaacccgtgtttcctcaagggctccttcaagcccaacctgcccttggtgtggtgctcgcacaagaaagcctgggtacagcctgggtgacagagcgagactccgtctcaaaaaaaaaaaaaaaagcctgggtaaccatgagcctcttccaggagtggttcctgcacttctgctctacagtggagggcgctgcacccagtacgaccttccctacaaggggctgcccatcctggacagcactcccggccaccctgggtgttgagacagagtctggctctgtcgcgcaggctggagtgcggtggcgcgatctcggctcactgcaacctccgcctcccgggttcacgccattctcctgcctcagcctcccaggtagctgggactacaggcgcccgccaccacgcccggctaatttttttgtatttttagtagagacggggtttcaccgtgttagccagaatggtctcggtctcctgaccccatgatccacccgccttggcgtcccaaagtgctgggattacaggcgtgagccatggtgcctggccctttaattcccccaatatttttttatctgcattaatttattatttcaagtgaacttccatctcaaatacatggttctcagacgcttccatgaactctcaagtgtgacttattacagcctggggctccttggagcacagtgtgccagtgacctagtggaaggccatgagaaagccaggttcactgttcactgtgcagcatctccctccatggtcttcctggagcctattcccactgcactgagcattccgtgtgtccagaggtagggttagcagggatagatggacttcctgcttattttctgttcacatttccactgaccttcaatcctgtagactgcaaagattgagccagctgagcccccaaagagactcagcagtgcagaatgtgggcctgagtgggaggactgcccagccgcacaccttccagctctgttcttcccgggccctggatgcttcttgccacgctgtcctctgaaatgacgctctgccccagcagacctgtggtaggtgagctagtgaggaagcacacctgggctcttcccaccaggcatcccagccctggtgtggggtatccgcatggttgcaggcatcccctggccaggcctgggtgctcattctccctctctcttcttgtctcctcccctctccctgctttctctgccctgtcctcctcctttttgctgttttcccccggactcctgccatgcccccagactttctttttcccacggatatgggctcattccaaggaaagggtggcatttggacacaaggccctagatcccacgatggaggactggggggtacctgatgcccctcagaaagaggcctgcagggacagcacatgggaaagccccatggctttgtgatccatctggggatgtgatccatttgggtaaggacttgggtttcagggcatgagttggcttccttgcaggatgcaggtccttaggtgggtggcctctgtctccagctgtagggccctgccaggaagcctctatatgagcctacctccctcctgcaggaccagagaggggttgttatgaacagcccaggggattggttgcactaagcttgtcttgaagctttggctggggagtccaggtgcccatgtctctcacctgctccccatacacatctctgcacacctggctgaggcattcccagacctaacctcagataatgtgcatgtgatgaacactcccaagtggctaggcctcttgcacctgagcaggtggattctgccccagcactggggctttctctgggctgtccatcatgggtatatctctggattccaggattgctagttagcacctcacatttgagggtctgtgctattcagtctagaatcagagttggatgagaaatcaactttgaacaccacctttggggtggctgcattggctcacacctgtaatctcagcactttaggaggctgaggcaggaggatagcttgaggccaggagttcgagactaaccggagcaacatagtaaggccacatctgtacaaaaaaaagaaagaaaaaattacccaggtttggtggcatgcacttgtagtcccagttgtgggctgaggattatgcaggtgacaaggcaagagactgaaggcacaaactgtttcagtataataaagaaaatagaataataatagtcataattatatatagagatgatcatgaacaattatcaatcattataataaacattattaatcattagctttaaaaaaaaaaaaaaaaaa

SEQ ID NO: 2189 - DNA, 4253 bp, Homo sapiens
ggtgcatgccgggacggcggtgggtggtgcatgcgctcgcatcatggcggctgagtgggcttctcgtttctggctttgggctacgctgctgattcctgcggccgcggtctacgaagaccaagtgggcaagtttgattggagacagcaatatgttgggaaggtcaagtttgcctccttggaattttcccctggatccaagaagttggttgtagccacagagaagaatgtgattgcagcattaaattcccgaactggggagatcttgtggcgccatgttgacaagggcacggcagaaggggctgtggatgccatgctgctgcacggacaggatgtgatcactgtgtccaatggaggccgaatcatgcgttcctgggagactaacatcgggggcctgaactgggagataaccctggacagtggcagtttccaggcacttgggctggttggcctgcaggagtctgtaaggtacatcgcagtcctgaagaagactacacttgccctccatcacctctccagtgggcacctcaagtgggtggaacatctcccagaaagtgacagcatccactaccagatggtgtattcttacggctctggggtggtgtgggccctcggagttgttcccttcagccatgtgaacattgtcaagtttaatgtggaagatggagagattgttcagcaggttagggtttcaactccgtggctgcagcacctgtctggagcctgtggtgtggtggatgaggctgtcctggtgtgtcctgacccgagctcacgttccctccaaactttggctctggagacggaatgggagttgagacagatcccactgcagtctctcgacttagaatttggaagtggattccaaccccgggtcctgcctacccagcccaacccagtggacgcttcccgggcccagttcttcctgcacttgtccccaagccactatgctctgctgcagtaccattatggaacgctgagtttgcttaaaaacttcccacagactgccctagtgagctttgccaccactggggagaagacggtggctgcagtcatggcctgtcggaatgaagtgcagaaaagtagcagttctgaagatgggtcaatggggagcttttcggagaagtctagttcaaaggactctctggcttgcttcaatcagacctacaccattaacctatacctcgtggagacaggtcggcggctgctggacaccacgataacatttagcctggaacagagcggcactcggcctgagcggctgtatatccaggtgttcttgaagaaggatgactcagtgggctaccgggctttggtgcagacagaggatcatctgctacttttcctgcagcagttggcagggaaggtggtgctgtggagccgtgaggagtccctggcagaagtggtgtgcctagagatggtggacctccccctgactggggcacaggccgagctggaaggagaatttggcaaaaaggcagatggcttgctggggatgttcctgaaacgcctctcgtctcagcttatcctgctgcaagcatggacttcccacctctggaaaatgttttatgatgctcggaagccccggagtcagattaagaatgagatcaacattgacaccctggccagagatgaattcaacctccagaagatgatggtgatggtaacagcctcaggcaagctttttggcattgagagcagctctggcaccatcctgtggaaacagtatctacccaatgtcaagccagactcctcctttaaactgatggtccagagaactactgctcatttcccccatcccccacagtgcaccctgctggtgaaggacaaggagtcgggaatgagttctctgtatgtcttcaatcccatttttgggaagtggagtcaggtagctcccccagtgctgaagcgccccatcttgcagtccttgcttctcccagtcatggatcaagactacgccaaggtgttgctgttgatagatgatgaatacaaggtcacagcttttccagccactcggaatgtcttgcgacagctacatgagcttgccccttccatcttcttctatttggtggatgcagagcagggacggctgtgtggatatcggcttcgaaaggatctcaccactgagctgagttgggagctgaccattcccccagaagtacagcggatcgtcaaggtgaaggggaaacgcagcagtgagcacgttcattcccagggccgtgtgatgggggaccgcagtgtgctctacaagagcctgaaccccaacctgctggccgtggtgacagagagcacagacgcgcaccatgagcgcacctttattggcatcttcctcattgatggcgtcactgggcgtatcattcactcctctgtgcagaagaaagccaaaggccctgtccatatcgtgcattcagagaactgggtggtgtaccagtactggaacaccaaggctcggcgcaacgagtttaccgtactggagctctatgagggcactgagcaatacaacgccaccgccttcagctccctggaccgcccccagctgccccaggtcctccagcagtcctatatcttcccgtcctccatcagtgccatggaggccaccatcaccgaacggggcatcaccagccgacacctgctgattggactaccttctggagcaattctttcccttcctaaggctttgctggatccccgccgccccgagatcccaacagaacaaagcagagaggagaacttaatcccgtattctccagatgtacagatacacgcagagcgattcatcaactataaccagacagtttctcgaatgcgaggtatctacacagctccctcgggtctggagtccacttgtttggttgtggcctatggtttggacatttaccaaactcgagtctacccatccaagcagtttgacgttctgaaggatgactatgactacgtgttaatcagcagcgtcctctttggcctggtttttgccaccatgatcactaagagactggcacaggtgaagctcctgaatcgggcctggcgataaagaacaaagactgtgcctaaaagtggagagccaggggagtgtgggtcagataagcagctacagctgcagtttggtggattggtggagtatgtgtgtgtgtcagtgctcagctaagaactgtagggaagatggatgaccttcacgcagaactccttttgggatatacatgatgcagaaaggatcctacatggagagagacagaactctctcagctgacactctcagagattcctgatgggctttctcttgaagtccaaaggcgtctgcattgtttcctttctttgcccatccatgaatgttctgttttgttttttttaataagaattccggctgatttttgtgaggcctgtttaaattgactttactttgccttttgtgtttctcaattttatctagaaatctttctgactttttccatctcttgcttcaaagtaagaggggaactctccttgccgactccaccttataggtacatttggtgttttgcactgggaagaaataggatccatccttagctgaggcttgaggactgatccagcctctcatggcttccctccaaagtaacttagggttgagggatctatatgtgatgtcaaaacttactttaaacctctagtttcgtgctgtcatttattaggctgggccaccaaatctttgtttcaatttatcagaagccaagtgcatactagcgtcttgtttgttgcccattgcctatacttttcacctgagatgtgtgagttggggccttttaaaaactactgaattgtctgagccttgaagacatttccagggagaagagataatctctcatttcacccacaggctggtctaatcataacctagttaaagatgtccttgtttaagaaccccattatttatttttagtttttaatataaattaacatgtgggtcattatatttctccttaaatgaggaaattttaaattttattgatctaacctttgaagctttaaaaaaggagaaagagggtaggggtgggaaactggcatactgtgtgtatagcactgccgattggctaggccactgtgtctctgctacaaattaaagaaatcctaaaagttttccttggtcatagagttggggaatgacagaatttttctttgttgtgaaatgtatgtacagagtagaccatctctagccctgtggtgaaagaggtacactcgaatgtttgcataaagcaagtgacaaatgaaaaaaaaaaaaaaaa

SEQ ID NO: 2190 - DNA, 1215 bp, Homo sapiens
tttggctatacatgccgggtaaactcatccacctctctgtcagagtgtctatgtggctgaatcgtttccagaaaagacctccagaaaatagcttcctgtttctccacaggtcagacatgaagcccaccctcatctcagtgcttgtgataatatttatactcagtcttctgtgatttcaataaggaagaagaatggaaactctcctgggagtgtctttggtgattctatggcttcaactggctagggtgaacagtcaacagggagaagaggatcctcaggccttgagcatccaggagggtgaaaatgccaccatgaactgcagttacaaaactagtataaacaatttacagtggtatagacaaaattcaggtagaggccttgtccacctaattttaatacgttcaaatgaaagagagaaacacagtggaagattaagagtcacgcttgacacttccaagaaaagcagttccttgttgatcacggcttcccgggcagcagacactgcttcttacttctgtgctacggacgcacagtgttccccaggaacctgcagcctctacgcaaaccctgccaaagcagcttcttagaagccctaatagtgggtagaattagtggttatgtctttcagtcaagaagagtctacaaacagctggcaaagtaaaaggggaactctttcaaattcgtgattttttaaaaagcatcttggactaggggaaaaggcatgaaatttggaacaggaaatggaaatgccaggctcagttctgctaatcctggctacatagggacattgtcagtgaagcagccttcaatttcctcacttgaaataaaggatatggatcaatgagcccaaaatattacttaatccctaattttattagggaaaaaaatcactgggcacttgtggaagaggaggaaggctgcacagttttagaaggtctcatttgtcctatgtgcagccctcccaagacatcagtgggtctttaaggtgcatgaggtggctcttaggttcctctaattcttgtataagaagcagtagattcattaagcattagaattggaagaggtcctaggactctcaaccaagcttttcattttagagctgaggagtaaaaccattgcataataacacagacaattttctgaatctttggagtgatagtgacaaatatctggatctgatttcaccatttattagttgtatgattcccaagcttc

SEQ ID NO: 2191 - DNA, 5863 bp, Homo sapiens
cgcttcctgtgcctcttcaggtcatcgcttgctctcgttcccaggctttggcttctagtggacgagaatcaccgagtctgcggggctggatgctgaccgcccggaccagcacctaggcgggcgggagctgtgcggcccagggttcgcgcgggccgggtagaggctcgagctgggacccccgagcgtgaaccccggagccggcggcgctggggccagaggggccgggagccccagggaggcggatctgggccccgagaaggacacccgcctggatttgccccgtaggcccggcccgggcccctcgggagcagaacagccttggtgaggtggacaggaggggacctcgcgagcagacgcgcgcgccagcgacagcagcccgccccggcctctcgggagccgtggggcagaggctgcggagccccaggagggggccagtgtcattcaaagatgtggctgtggatttcacccaggaggagtggcggcaactggaccctgatgagaagataacatacggggatgtgatgttggagaactacagccatctagtttccttggcttatgaggtggcaacatcttgtacttcggagattctgaagccgagcaacttgcccaagtccttcttcttttcccattaacaagatatgatatcaccaagccaaacgtcatcattaagttggagcagggagaggagctgtggataacgggaggtgaatttccatgtcaacatagtcctgggatcgtgggactttaccagatcggtttgtaataacacctcgaagacgctatccgatccatcagacccagtattcctgtccgggggtacttcccacagtgtgctggaatggttatcacaagaaggctgtgctgtcccctcgcaactccaggatggtgtgtagcccagtgactgtgaggatcgcccctcctgacagaagattttcacgttctgcgataccagagcagataatcagctcaacactgtcgtcaccatcaagtaatgccccagacccatgtgcaaaggagactgtactgagtgccctcaaagagaagaagaagaaaaggacagtggaggaagaagaccaaatattccttgatggccaggaaaataaaagaaggcgccatgatagcagtggcagtggacattcagcatttgagcccctggtggccagtggagtccccgcttcttttgtgcctaagcctgggtctctgaagagaggcctcaattctcagagctcagatgaccacttgaataagagatcccgaagctcttccatgagctccttgacaggcgcttacacaagtggcatccctagctccagccgcaatgccattaccagttcctacagctccactcgaggcatctcacagctctggaagagaaatggccccagttcatcacccttctctagcccagcctcatcccgctcccagacaccggagaggccagcaaagaaaataagagaagaagagctgtgtcatcattccagttcttcaactccattggcagcagacaaggagtcccagggagaaaaggctgcagatacaaccccaaggaagaaacaaaactcgaattctcagtctacacctggcagctctgggcagcgtaagcggaaagttcagctgctgccttctcggcgaggggaacagctgaccttgcctccacctccccagcttggctattcgatcactgccgaggacctagacttagagaagaaggcttcattacagtggttcaaccaggccttggaggacaagagtgatgctgcctcgaactctgtcactgagaccccacctaccactcagccttcatttacctttaccctgcctgctgctgcaactgcctccccacccacctccctcctggccccaagcaccaacccactgttagagagcttgaagaagatgcagactcccccgagcctgccaccctgcccagaatctgctggagcagcaaccactgaggccctctcacctccaaagacacccagcctcctacccccgctgggtttatcacagtcagggccgccagggctgctccccagcccctcctttgactccaaacccccgaccactttgctggggctgatccctgctccatccatggtaccagccactgacaccaaggcacctccaacccttcaagcagagacggctaccaaaccccaagccacatctgccccgtcccccgcccccaagcaaagcttcctgtttggaacacagaacacctcaccttccagccctgccgcccctgctgcatcttcagcatctcccatgttcaagcccattttcacggctccacccaagagtgagaaggaaggccccacaccgcctggcccttcagtcacagccacagcgccctccagctcctccctccccacgaccaccagcaccacagccccgaccttccagcctgtctttagcagcatggggccacctgcatctgtgcccttgcctgctcccttcttcaagcagacaactactcccgccactgctcccaccacaactgccccgctcttcactggcctggccagcgccacctctgctgtggctcccatcacctctgccagtccatccacagactctgcttcgaagcctgcgtttggctttggcataaacagtgtgagcagcagcagtgtgagtaccacgaccagcaccgccactgccgcctcacagcctttcctcttcggggcgccccaggcctctgctgccagcttcaccccggccatgggctccatattccagtttggcaaacctcctgccttgcccacaaccaccacagtcaccaccttcagccagtccctgcccactgccgtgccaacggccaccagcagcagcgctgccgactttagtggttttggcagcaccctcgccacctccgccccggccaccagcagccagcccactctgacgttcagtaacacgagcacccccacgttcaacattccctttggctcaagcgccaagtccccgctcccatcatatccgggagccaacccccagcccgcatttggggccgctgaggggcagccaccgggggccgccaagccagcccttacccccagctttggcagctctttcacttttggaaactctgcagccccggccccggctactgcacccacacctgcacctgcgtccacgatcaagatcgtgcctgcgcacgtgcctacgcccatccagcctacctttggcggtgccacgcactcggcgtttggattgaaagccacggcttccgccttcggcgctcccgccagctcacagcccgcctttggcggctccactgctgtcttctccttcggtgcagccaccagctccggctttggagccaccacccagaccgccagcagcgggagcagcagctcggtgtttggcagcacaacaccatcacccttcacgtttgggggttcggcagcccccgctggcagtgggagctttgggatcaacgtggccaccccaggctccagcgccaccaccggagctttcagctttggagcaggacagagtgggagcacagccacctccacccccttcacagggggcttaggtcagaacgccctgggcaccaccggccagagcacaccgtttgccttcaacgtgggcagcacaactgagagcaaacctgtgtttggaggcaccgccacccccacctttggtcagaacacccctgcgcctggagtgggcacatcgggcagcagcctctcctttggggcatcttcagcacccgcccaaggctttgttggtgttggaccgttcggatcggcggccccttcattttccattggtgcgggatccaagaccccaggggctcgacagcgactgcaggcccgaaggcagcacacccgcaaaaagtagcctttgtcccctgtccctgttccccccaccccttccctaaatctggaccttggcacgtgctagaaagagccttggacccttccagctgcgtaaagcaaacctaccccggatctctggcttcagccgccagggggcagtggcagccctggggccctttcccttctggaggaagcacaagcctcagggaaggggaagcaggatgcggagggccaaagcccgggacctctacttgaacagttccactggggaggctggagaactaaggacctgtacatagtgtccgctgccctgactcccgcttagcgcacccttaggcaggcgccccttccacctttccccgagagccgtcgtcgctggagggggcagggtccagcccgcctggatcggtggtgtgcacctgatgggatttgggaaatgggttatccctaaagctttatcttgcttggcttagctgtgagaagtggttctcttcctctggtcccttctggggactctgtttccccatttcttgctgctgtgtccctcaccggttccttgcaggattccctcctttttaaatgcccttgaatctagctttgccttggagaccccagtgggtgctgctcctgccgttttcttcctgccaagcctgaatcaatgtttcatctccaaccctctgccagtttggcccctcagagcttggtggctcaagactgttagcctggcagagccaggggtgaagggagaagctcttggagcaggcaggatgcccaccgctgcttcagctgcctcctcgcccagctaccctttggccccattgggccctcgtctgcctctccaggattgtatgtttcaagccttgtcctgtgttcctttgtctgacgctctgtgtattgctctttgaatcgagtttggaggaagagttgagttgtatgagtggcggcatgttggtagtgccggacttcctgtttcaagttttctggggcctcgctaattgaatgtggaaagtagcaccacttgacggctacaagtgccgactcctgaattttcccatggtgttctgacttcaagggctggcagccagggagaatgggcccaggggaagcaaagacctcttccctctgcggtttctgtcccacttaactgacctcactggaggctacgtcacccaaagtagatgttagaaaacctaaattaatgaaccatatttttaaaatcctatttttcccaaacagggccctctgcagcccatcctttccttccgtccttctgaaaccacataccccaggcccaagcgccttgctgtcacgcccaacctctttgggagaagtatgaatgcgtgtgtctaaattaaaagaaaaaaatatttaaacgttttttaacaaaaatttatttttgtatttaagctaaattgccttttaaattccttcaagcttggttcattgaggtggttaagtataaatgctattaactaggaattagctgtatagttaagttatgcctgtgcaaagaagaggctcaaatgctgtccccggcagctttcctgggggactagagctccttctggccatgttatatgaaatgtaattcttattttataaataatgtgatgtagatgtaaccggtgccccctccccgttgtgactgagggcgagtgttatacctggctgcgtgtgcagctgaggagggagtgaacctcaagcctaaatacctgttaggattggagggtctgggtgggcctgggcctagcaatcaatcaagcttctacctgtaccttatgtaaggtagaccctcctagtgtcagtacctgagcttgtttacctcagttccgcaggcaggacagccggtccgggaaccctgagtgagagtgagtgtggatgtgtacagtacacacactggacggcagcgggaggctgggactttccattacaaatagagacttcattcctgttgagtctagttggaatttttagtatgaatgtgagatttttctcctgcttgtgacattaagaataaaaaactgtgatctatcgta

SEQ ID NO: 2192 - DNA, 4635 bp, Homo sapiens
attagccgtcgctccgcttcgccatctcgggctttgtctggcgactcgctgccccggcgtcggctgcagcggagctgcggctcgactgttcggcccgccgtgctcccaggtgcccccggcctgcgctcccatccacacgctcgggtgaggtggctttgaccccgggttgcccggccagcacgaccgaggaggtggctggacagctggaggatgaacggagaagccgactgccccacagacctggaaatggccgcccccaaaggccaagaccgttggtcccaggaagacatgctgactttgctggaatgcatgaagaacaaccttccatccaatgacagctccaagttcaaaaccaccgaatcacacatggactgggaaaaagtagcatttaaagacttttctggagacatgtgcaagctcaaatgggtggagatttctaatgaggtgaggaagttccgtacattgacagaattgatcctcgatgctcaggaacatgttaaaaatccttacaaaggcaaaaaactcaagaaacacccagacttcccaaagaagcccctgaccccttatttccgcttcttcatggagaagcgggccaagtatgcgaaactccaccctgagatgagcaacctggacctaaccaagattctgtccaagaaatacaaggagcttccggagaagaagaagatgaaatatattcaggacttccagagagagaaacaggagttcgagcgaaacctggcccgattcagggaggatcaccccgacctaatccagaatgccaagaaatcggacatcccagagaagcccaaaaccccccagcagctgtggtacacccacgagaagaaggtgtatctcaaagtgcggccagatgagatcatgagagactatatccagaagcacccagagctgaacatcagtgaggagggtatcaccaagtccaccctcaccaaggccgaacgccagctcaaggacaagtttgacgggcgacccaccaagccacctccgaacagctactcgctgtactgcgcagagctcatggccaacatgaaggacgtgcccagcacagagcgcatggtgctgtgcagccagcagtggaagctgctgtcccagaaggagaaggacgcctatcacaagaagtgtgatcagaaaaagaaagattacgaggtggagctgctccgtttcctcgagagcctgcctgaggaggagcagcagcgggtcttgggggaagagaagatgctgaacatcaacaagaagcaggccaccagccccgcctccaagaagccagcccaggaagggggcaagggcggctccgagaagcccaagcggcccgtgtcggccatgttcatcttctcggaggagaaacggcggcagctgcaggaggagcggcctgagctctccgagagcgagctgacccgcctgctggcccgaatgtggaacgacctgtctgagaagaagaaggccaagtacaaggcccgagaggcggcgctcaaggctcagtcggagaggaagcccggcggggagcgcgaggaacggggcaagctgcccgagtcccccaaaagagctgaggagatctggcaacagagcgttatcggcgactacctggcccgcttcaagaatgaccgggtgaaggccttgaaagccatggaaatgacctggaataacatggaaaagaaggagaaactgatgtggattaagaaggcagccgaagaccaaaagcgatatgagagagagctgagtgagatgcgggcacctccagctgctacaaattcttccaagaagatgaaattccagggagaacccaagaagcctcccatgaacggttaccagaagttctcccaggagctgctgtccaatggggagctgaaccacctgccgctgaaggagcgcatggtggagatcggcagtcgctggcagcgcatctcccagagccagaaggagcactacaaaaagctggccgaggagcagcaaaagcagtacaaggtgcacctggacctctgggttaagagcctgtctccccaggaccgtgcagcatataaagagtacatctccaataaacgtaagagcatgaccaagctgcgaggcccaaaccccaaatccagccggactactctgcagtccaagtcggagtccgaggaggatgatgaagaggatgaggatgacgaggacgaggatgaagaagaggaagatgatgagaatggggactcctctgaagatggcggcgactcctctgagtccagcagcgaggacgagagcgaggatggggatgagaatgaagaggatgacgaggacgaagacgacgacgaggatgacgatgaggatgaagataatgagtccgagggcagcagctccagctcctcctcctcaggggactcctcagactctgactccaactgaggctcagccccaccccagggcagccagggagagcccaggagctcccctccccaactgaccacctttgtttctcccccatgttctgtcccttgcccccctggcctcccccactttctttctttctttaaaaaaaaaaaaaaatacggtgggggtagggggctggaggagcccaggccaggactctgcagcctcagagacatcagcccttgggggtcctcctccagggacagcaactatcagactaagccagcaccggaccagcctggcccaccccacccacttctgcacttgcggttccggcatggacaatggaccggagagtgggggtggggggtcccaaagagtttgatgaggccctccacacctgcggcccaatccaaggtggggtggaagcttggggaagacccattccttcccagaggggcctgccacctggacccctgcattggaactggaggcagggaacatggggaggaggagggtcggtgccttcaagaaaacaggcactgccctggtggccctctcccctgccccctgcaggaaggagctgcctggacccgttcatgggggagggggcagaagtgttttttatatatgtgtatatatttttttttaagctctgagctgtcaacgagacgtttcctaccgatctcggctgccgtctctgttgtcatttctgggagagggagggtttaggggtagatttggaaccttttaaaaatggtcttgatgtatgtggaagagagtatgtgtatgtgtgttcctgtacatagcatgggtgcagctgtggatgtgtgcaaaagagtgtgagtgtgtgtgtgtgtgtgtaaaggggtctgtcctagagcccacatcagtttgttgtgaatctggaaaaagggtcggtgagggccgggagatgttgaccctggtgggagcaggctgaggctgccccgttctccacatcctctgttttgcccagtctctgattccattagggggagtgtgctgaagccattctcggatgcttcccagaccaggctccctctgccagagtcacatgcatccgagctgctggtctccattgtccagcaggaaggcggaaaggcaggcaagatggtgtgaagcttaaagcttgtatttgatggaaaaggtctcccctgttcatctgagaggccaagcctggccaccccaggctcagaacctgggcttcaagaaatgtgctgggagctcctaacttacacatccctccagccttccttgaatcctcccaccaccccctatttcctttaatttctcaggtctgctccctcctcccccaaccccacagctgggcaagaagtctgcaaaagctgcatctgcagctgtctctaactcttcccagccatctcccgtattttttggtaccttgattccttgactcttaataagccaagccaccttatctctgtagttcttatttttttgttgactaaatttggggggttcttttttatggtcatgtcactgacctattaaattggggcttggtgcttttccaccttccccctctgaatgaaagccaaggaatgggggaagagcgggaactctgccgcggaggtggagcaagaacggtgaagggccctggtcccagagaggctggtgggtccctctcccaaaggaaggcagacagtctctgctttgccttggaccttggtgctgggggtggggaggcctgggggggacactccccactcccattccccttcctttgtcctaatcctggaattaagtacaggggtttataggttctatttcttcccaagagccctgcaaagaaccccagtttcctatttggatgcccctacactgttgtgtttcagtggaatgtattttcatttaaaaacaactttgaatggggcactttttctttcctgttttaaaaattgaaaaattcttacagtacaaacaggactgtcagggtgggggtgttggtgctgtaagaggtcactcttgagtgcattttggcactgggatgggatggctggggtgggaagacccccatccccacccccaacttcttttctaatatttaaggagtgttttgtaggattcaacaaccaccacaacttgaatttgtatcatgggaggtgggagggagtggcttagaggtgtctgcctatgcttaaagccaactgtggaagttttgttttcccttttttgtataataaagtgaaaaacaaaggtttgaaaaaaaaaaaaaaaaaaaaaaaaaaaaaaaaa

SEQ ID NO: 2193 - DNA, 2207 bp, Homo sapiens
cacttcctccccagacaggggtagtgcgaggccgggcacagccttcctgtgtggttttaccgcccagagagcgtcatggacctggggaaaccaatgaaaagcgtgctggtggtggctctccttgtcattttccaggtatgcctgtgtcaagatgaggtcacggacgattacatcggagacaacaccacagtggactacactttgttcgagtctttgtgctccaagaaggacgtgcggaactttaaagcctggttcctccctatcatgtactccatcatttgtttcgtgggcctactgggcaatgggctggtcgtgttgacctatatctatttcaagaggctcaagaccatgaccgatacctacctgctcaacctggcggtggcagacatcctcttcctcctgacccttcccttctgggcctacagcgcggccaagtcctgggtcttcggtgtccacttttgcaagctcatctttgccatctacaagatgagcttcttcagtggcatgctcctacttctttgcatcagcattgaccgctacgtggccatcgtccaggctgtctcagctcaccgccaccgtgcccgcgtccttctcatcagcaagctgtcctgtgtgggcatctggatactagccacagtgctctccatcccagagctcctgtacagtgacctccagaggagcagcagtgagcaagcgatgcgatgctctctcatcacagagcatgtggaggcctttatcaccatccaggtggcccagatggtgatcggctttctggtccccctgctggccatgagcttctgttaccttgtcatcatccgcaccctgctccaggcacgcaactttgagcgcaacaaggccatcaaggtgatcatcgctgtggtcgtggtcttcatagtcttccagctgccctacaatggggtggtcctggcccagacggtggccaacttcaacatcaccagtagcacctgtgagctcagtaagcaactcaacatcgcctacgacgtcacctacagcctggcctgcgtccgctgctgcgtcaaccctttcttgtacgccttcatcggcgtcaagttccgcaacgatctcttcaagctcttcaaggacctgggctgcctcagccaggagcagctccggcagtggtcttcctgtcggcacatccggcgctcctccatgagtgtggaggccgagaccaccaccaccttctccccataggcgactcttctgcctggactagagggacctctcccagggtccctggggtggggatagggagcagatgcaatgactcaggacatccccccgccaaaagctgctcagggaaaagcagctctcccctcagagtgcaagcccctgctccagaagatagcttcaccccaatcccagctacctcaaccaatgccaaaaaaagacagggctgataagctaacaccagacagacaacactgggaaacagaggctattgtcccctaaaccaaaaactgaaagtgaaagtccagaaactgttcccacctgctggagtgaaggggccaaggagggtgagtgcaaggggcgtgggagtggcctgaagagtcctctgaatgaaccttctggcctcccacagactcaaatgctcagaccagctcttccgaaaaccaggccttatctccaagaccagagatagtggggagacttcttggcttggtgaggaaaagcggacatcagctggtcaaacaaactctctgaacccctccctccatcgttttcttcactgtcctccaagccagcgggaatggcagctgccacgccgccctaaaagcacactcatcccctcacttgccgcgtcgccctcccaggctctcaacaggggagagtgtggtgtttcctgcaggccaggccagctgcctccgcgtgatcaaagccacactctgggctccagagtggggatgacatgcactcagctcttggctccactgggatgggaggagaggacaagggaaatgtcaggggcggggagggtgacagtggccgcccaaggcccacgagcttgttctttgttctttgtcacagggactgaaaacctctcctcatgttctgctttcgattcgttaagagagcaacattttacccacacacagataaagttttcccttgaggaaacaacagctttaaaagaaaaagaaaaaaaaagtctttggtaaatggcaaaaaaaaaaaaaaaaaaaaaaaaa

SEQ ID NO: 2194 - DNA, 3033 bp, Homo sapiens
aggggtgagctggcggcgggggaggcgggcagcggagccaagctgacccggcgagcggagccggggctggagagcggcgaccactgcggatctcggaaggaagaaatgatgtaaatcactcatccaaaccttaaggtcaaaggtgagaaggaaggtcaggaagaacatggcctggccaaatgtttttcaaagagggtctctgctgtcccagttcagccatcatcatgttgtagtgttcctgctcactttcttcagttattcgttgctccatgcttcacgaaaaacatttagcaatgtcaaagtcagtatctctgagcagtggaccccaagtgcttttaacacgtcagttgagctgcctgtggagatctggagcagcaaccatttgttccccagtgcagagaaagcgactcttttcctcggcacactggataccattttcctcttctcctatgctgtgggcctattcatcagtggcatcgttggggatcggttgaatttgcgatgggttctgtcttttggcatgtgctcttctgcattagtggtgtttgtctttggtgcgctcacagaatggctgcgtttctacaacaaatggctgtactgctgcctgtggattgtgaacggcctgctgcagtccactggttggccctgtgtggttgctgttatgggcaactggtttgggaaagccggacgaggagttgtttttggtctctggagtgcctgtgcttcggtgggcaacattttgggagcgtgcctagcttcttctgttcttcagtatggttatgagtatgcctttctggtgacggcgtctgtgcagtttgctggtgggatcgttatcttctttggactcctggtgtcaccagaagaaattggtctctcgggtattgaggcagaagaaaactttgaagaagactcacacaggccattaattaatggtggtgaaaatgaagacgaatatgagccgaattattcaatccaagatgatagttctgttgcccaagtcaaggcgataagcttctaccaggcatgttgccttcctggagtcataccgtactcactggcctacgcctgcttgaagttagtgaattactccttcttcttctggctccccttttatctgagtaacaacttcggctggaaggaggcggaagccgacaagctgtccatttggtacgacgttggagggatcatagtatttagtgtctctgatccgggacaagctaggatggatgtgggttttctactttttcattctcatgacaagttgtacaattgtgtttatctcgccattaatagtgagggaaatattctctctcgtgctaaggagacaggctcacatattgagggagtgaccggtgcccgcgagacagaaagaacaatgtcagccacatcaggaccgctggggcttcgagtctgccctaatttgggtttgtctaggagctccagcctgatcttggattgtcaggcgtctctcaacactgccagccacctgagatgctgaccagcagtgaaggctgcactagttttctacactacaggaattactgttgatgatttttgctgttgtttcatgaatgtgccgagtgacttctgactctgccagcatctttgacctctgactctgcccgcgtctttgtttggcctattgaggtttagcgttttaaccttaactgttgttttggacttgaactttctctagccttgaaaatggagtgaacaggaggcaaagccacgcgtggtttgtgttggtggtatgttccacaaatggaagagatcattgcattttgctttggtaatgagtttacagagagtgggtcatctttgaagcatcaaatcctgatcaaatgctcaagctggaccgagctgcaagcctgccttggacaaagaatccctctgttcactgtggtgggaaagatcacactacatgcctgttgattggctcagtcactctgtgtctgatctaaacgtcattcagccctagaagcatgaattgcttcaaattattgtcaacttgttctcttccattttcattcaaattaactttgactcctggaagtattgagtcttcctttcaaggaccataaggtacatcagttatcttgaacattctgacgtgtaaaggaccataaggtacatcatttatcttgaacattccgacgtgtaactcacagccgaagcactccatcccagatttgttgtctgggaacttaggatcctctaggaagctaatctgcttagtctatttttagaggattgatctctggcacaagcagcttcctggagttacctcagcagaagactagaattagagaaaagggaaagaccttttcttctagtaagtgtcaagtacagatgctctttgacttatgatggggttatgtcccagtaaacccattggaagtcaaatgcatttaatacccctgactggacaccacagcttagcctcgtccaccctaaatgtactcagaacacttagaattgcccacagttgggcagaatcatctaacacaaactctattttataatcgagtgttgaatatatcatgtaatttattgaatattgtacattatgttgaaattgcaaccatttcacaccattgtaaagtccaaaaatcagaagctgaggactgtctgtacatgacattgaatcacatgaatggattactagggcctgaggggtgtccgttctttagaaaaatgtagagtatatatatcttcagggctgtgaattccatactagttatcaatattttaagatcattctgtatatacatattttaaattatgcaagcaaactaggaggagaatgtgcaattttgagggatacctaatttgcattcggttaggggatatttttcaacctcttgctttatactctgatatggggtgtgtttatgaacttgttaatgttatttaatcatgcagatttccaatcagtgtattgctcatttactgacaaaaagggaaaatacgaaacacagaaagggaaaataaactgacttttataatgaaaaaaaaaaaaaaaaaaaaaaaaaa

SEQ ID NO: 2195 - DNA, 3606 bp, Homo sapiens; identical to SEQ ID NO: 269

SEQ ID NO: 2196 - DNA, 6620 bp, Homo sapiens; identical to SEQ ID NO: 2123

SEQ ID NO: 2197 - DNA, 5730 bp, Homo sapiens
cctccgcctccactcgccctcgtgctcccttcagccccttcgcagctccgtgcgcaaggtcgtgtcccggaagtgaaggggccatgttgatgggtgacccggggagaggtacccggccagaggcgagtcctgcggagtggtagcgcgcacggcctgcggtgtgacacccagcccctgccagtcccccatggccccgtggagccgagaggcggtgctgagtctctatcgggctctgttgcgccagggccgacagcttcgctacactgatcgagacttctactttgcctccatccgccgtgaattccgaaaaaatcagaagctagaggacgctgaggcccgggagaggcagctggagaagggcctggtctttctcaacggcaaattggggaggatcatttaggatcctccaagggaaagaggacaaaggtgccttctgtagacactcctgctctcttccatccccatcttacagatgtattaagaagcctcagatgagcaatggcaggcgctggtgagcgcaaaggcaagaaggatgacaatggcattggcacggccattgactttgtgctctccaatgcccggctggtgctgggggtgggtggagcggccatgctgggcatcgccacgctggcagttaagcggatgtacgatcgggcgatcagtgcccctaccagccccacccgcctgagccattcggggaaaaggagctgggaagaacccaactggatgggctccccacgactgctgaacagggacatgaagacgggcctgagccggtccttgcagacccttcccacagactcctccaccttcgacacagatacattctgcccgccccggcccaagccagtggccaggaagggccaggtagacttgaagaagtcacgactccgcatgtccctgcaggagaaacttcttacttactaccggaaccgggcagccatccctgctggagagcaggctcgggccaagcaagctgctgtggacatatgtgccgagctccggagcttcctgcgggccaagttgcctgacatgccgcttcgggacatgtacttgagtggcagcctctacgatgacctgcaggtggtgacagctgaccacatccaactcattgtgccccttgtgctggagcagaacctgtggtcatgtattcctggtgaagacaccatcatgaatgtccctggcttcttcctggtgcgtcgtgagaatccagagtactttcctcgtgggagcagttactgggaccgctgtgtagtagggggctacctctctccaaagacagtcgcagatacatttgagaaggtagtggctggctccatcaattggccagccatagggtccctcttggactatgtgatccgcccggccccacccccagaagccctcacactggaggtgcagtatgagcgtgacaaacatctcttcattgacttcctgccatcagtgaccctcggtgacacagtcttggtggccaaaccacaccggctagcccagtatgacaacctgtggcggctgagcctgcgtcccgcggagacggcacgcctgcgggctctggaccaggctgactcgggctgccgatctctgtgcctcaagatcctcaaggccatatgcaagtccaccccggctctgggccacctcactgccagccagctaaccaatgtcatcctccacttggcccaggaggaggctgactggtctccggatatgctggccgaccgtttcctgcaggccttgaggggacttatcagctacttagaggctggagtcctgcccagtgccctaaaccccaaggtgaacttatttgcagagctcacccctgaagaaatagacgaattaggatacactctgtattgctcattgtctgagccagaggtgctgctgcagacgtagggcaggtgaaggccaaagcgggtgttggtggtcaggccctggattctccgttagatacacttggctacctagttggtgcctcacagggttcctgctgcctggtgtcttgctgatcatcaccctggtcacttcatgctgattagaatgacatctctttcgtctcctattttgttacccaactcttcctatttttgttaccaatcactgtgctctctgccgccccctggctccaggctaatttttctggaatgaattgagaaggtggcgtgctggcctgagctgatggaccacttggtgttttgcgttttggcccatgtttgctgcctctatctggtctgccttgcccgtttgcctgttcctattcagtgtcttttctattttttcctctctcgttcatgccttctgttttgctcttgtccctggagcatatctgcctaattaagatgttgccttttagttgaatgccactgaagagctgtgatagcatgtttcaaagctgaactctacagagcgagtgctgagacagtatttagggtttctgggagtgaggctggtagaagagttggcctttgaccacggttcctggagtagaagtccatcctccccccaacctcctgacccattcataaatgctgagaatgtctctcatgggaacactgttaatgacccacacaggataagctgaatgcaaagttatttgcaggttgaatttcttggtggctattagcagaagtgcagagtagggaaccagagctggttaagggcctagtgaagggtttgtgtgcccagtgtctgctcgtcatctgtggctgcaggggtcagacagacaaggatggggactgccagggcaccacttcatcatgaatgctggttttcacaccttttccttattttattgccaatcaggacaaggccttgaaggaacgcagccttagacatcaggtgaggatgatggaggtagacagtcgactgaatgtcagctggaaaatccagtcactagttggggtttggtggccatgttttctacccagacaggccctgcttttctaggatgtggccttagagcaagaacagacccaacagccagcccttcatcctccagcgtctgccataggaatgtgagaggggtgtttgctgagcgctccgggcacggccagagggcaagtgagcatgcacggacctcttccccctgtcctgtttctcacccagcacctggggagatcggtgctaccaaggaagagagcacacagataagacagaggggaggaggtgggcatttcctacattcctccttgtttgccgctgctgagattgcagtatttattgcaatgtaaatgtatcctgaaggtggggaggaatgtttaatctaccatgtccgtgtgtcatcttggtttgtgtttttccctgtttgtagcaagactctgatgataattctgtttctcatctgcccattcagtattttgttttccttccgtcaagttgtcttattttttcaatgactacctctccatcattgaggttctggtgaagctctctgcagctgtctcattccttcccaacgatagtaacaggaaatgactctttagcatcgatacctcaacatcaatttagggtagagattcctgcccctcttttgtcacagattaggaaattgagaactagggttaaccttgactatatttagaggtctttttgcctcttttccccttaacaaggatttcttatggtggtttcagtttcatttgcataaaggtattgagagggaacaaaaaacataaagctgagaatcttgagagagctcatctaccctgtctgttggtcagactcaaatgagagttaaaaaaaaaaaaaaaaatctgtatgcctgagtaccatcctggatgaatctagaaggtatggggtagagcttgacagggttcctgtgtacccactgggtatccgttagaggtaagggagaggagaggattgatagagtgttgcaaaagtatagattattcattgagataaaggatttggtttccctgccatgagtattaaaaaaatttaagttttcccaagcttgcatctctgaccaaatttcacataaaacattggaaggaggctgggtgcggtggctcatgcttgtaatcccagcactgggaagctaaggcgggtggatcacttgaggtcaggagttcgagaccagcctggccaacatggtgaaaccccgtctccacgaaaaagataaaaataagctgggcgtggtggcaggcgcctataatcccagctactcgggaggctgaggcaggagaataacttaaacccgggaggcggaggttacagtgagctgagatcgtgccactgcactccagcctgggtgacagagtgagaccctatttcaaaaaaataaaaattggaagaagagcttaaaaaagataagattttaaagagtcccaagttatttaagttgagtgtaattgtcatttaaggaaggcaaatgagtttatcatccttcttaaagagcatctcttttaactgttggacaaaaccataactttgtcattttacaaggaagaacctcttaagaagtcctcagaaccagaagcaatgtgaactctcagcgctggtcctggtgggtttgctgaccatgactgggcaagccgttctttttgctgccatcttcctcatcataaagtgtggaacataggcaattgctttgagattcttggatagaagaggacaacattctgcacctgcccccttttttaaatctttggggaaagatgagtaactttccccactactctgccttcctgttcagtaactcttacttttgcctgaagtaacagcatcttctacttctccatctagagatttttgtgtgtgtgccatcaaggttagcaaactttatacgtagcctaacacttaaaaaatgcactcattatcttaaacctaataaattccagagtttattttggttctcctctgttgcccttcctaaaaaatgagctgaagatgacagtatttttctttacatgcttggttatgacttttaaagttttatttaaataaatgttgaagctcaagtttaaagaagcgttgcagaggcccacggtctcctgggtcccggccacctgtccatattccacatttgctgactgtgctccctgcactccactcaagttgagagttcaaatagtcttgaaggggaatcagcttcaggatggaaggacccaggagaggccccgaggtgggagggttctgtaaatacagactactgcgagtgtccagagctctctgccatgatacttccttgggactgacttggctgagaacgtgttctgtcagaggatttgttagaactctgcccttttgtctgaaactcaaggccaaggagaatgataggagacttaggacagagctgacccttgcaccaggctgggaggctgcagcccttttagatgccacttactgtaagtggccagaataccagagaggtgggttccatggtcaaatgcacagtaggtgtttacctttacatttggatcaccttgtagtctttaaattcttggtccctgaggccaagtccacaacttgccttctagtcacttgcctgcccgcagtggtggtggatgtgttagctggtagatttggaatcagtcaccagtctttctgtactgtcttggttagctctatataagtaggggcagcttagccctgaggcccagagacctgctgtcctttttctccttgagggaggaaataaaactgcggaatacaatgtccttccatagcatgggaagaagaaaataaacatctcctttccaacaaaaaaaaaaaaaaaaaaaaaaaaaaaaaaaa

SEQ ID NO: 2198 - DNA, 1949 bp, Homo sapiens
gggagagcagtttacgacagcgccggtcgtgtttacggcggcgcccgctgcgcgcgcatgtttcctcttttcctggtttctcaagagtgctgctgctaacgcggtccccggcacgcaccatctgttgccatcccggccggccgaggccattgcagattttggaagatggcaaagttcatgacacccgtgatccaggacaacccctcaggctggggtccctgtgcggttcccgagcagtttcgggatatgccctaccagccgttcagcaaaggagatcggctaggaaaggttgcagactggacaggagccacataccaagataagaggtacacaaataagtactcctctcagtttggtggtggaagtcaatatgcttatttccatgaggaggatgaaagtagcttccagctggtggatacagcgcgcacacagaagacggcctaccagcggaatcgaatgagatttgcccagaggaacctccgcagagacaaagatcgtcggaacatgttgcagttcaacctgcagatcctgcctaagagtgccaaacagaaagagagagaacgcattcgactgcagaaaaagttccagaaacaatttggggttaggcagaaatgggatcagaaatcacagaaaccccgagactcttcagttgaagttcgtagtgattgggaagtgaaagaggaaatggattttcctcagttgatgaagatgcgctacttggaagtatcagagccacaggacattgagtgttgtggggccctagaatactacgacaaagcctttgaccgcatcaccacgaggagtgagaagccactgcggagcatcaagcgcatcttccacactgtcaccaccacagacgaccctgtcatccgcaagctggcaaaaactcaggggaatgtgtttgccactgatgccatcctggccacgctgatgagctgtacccgctcagtgtattcctgggatattgtcgtccagagagttgggtccaaactcttctttgacaagagagacaactctgactttgacctcctgacagtgagtgagactgccaatgagccccctcaagatgaaggtaattccttcaattcaccccgcaacctggccatggaggcaacctacatcaaccacaatttctcccagcagtgcttgagaatggggaaggaaagatacaacttccccaacccaaacccgtttgtggaggacgacatggataagaatgaaatcgcctctgttgcgtaccgttaccgcaggtggaagcttggagatgatattgaccttattgtccgttgtgagcacgatggcgtcatgactggagccaacggggaagtgtccttcatcaacatcaagacactcaatgagtgggattccaggcactgtaatggcgttgactggcgtcagaagctggactctcagcgaggggctgtcattgccacggagctgaagaacaacagctacaagttggcccggtggacctgctgtgctttgctggctggatctgagtacctcaagcttggttatgtgtctcggtaccacgtgaaagactcctcacgccacgtcatcctaggcacccagcagttcaagcctaatgagtttgccagccagatcaacctgagcgtggagaatgcctggggcattttacgctgcgtcattgacatctgcatgaagctggaggagggcaaatacctcatcctcaaggaccccaacaagcaggtcatccgtgtctacagcctccctgatggcaccttcagctctgatgaagatgaggaggaagaggaggaggaagaagaggaagaagaagaggaagaaacttaaaccagtgatgtggagctggagtttgtccttccaccgagactacgagggcctttgatgcttagtggaatgtgtgtctaacttgctctctgacatttagcagatgaaataaaatatatatctgtttagtctttccctca

SEQ ID NO: 2199 - DNA, 4758 bp, Homo sapiens
cccgagccgagcccgccgcggtcacagccacccgcgggaagctcgtggccgggaccccgaggcgggagcgcgggctgggccgggctgggctacgcgcacgggctcggccgccgcccctgccggttgcataccctgtcctgagggcgcggcacggagtgcatgcgggccgctgccatgacgaccgccatcttggagcgcctgagcaccctgtcggtcagcgggcagcagctgcgccgcctgcccaagatcctggaggatgggcttcccaagatgccttgcactgtcccagaaacggatgtgccccagctcttccgggagccttacatccgcaccggctaccgccccacggggcacgagtggcgctactacttcttcagcctctttcagaaacacaacgaggtggtcaacgtctggacccatttactggcagccctggccgtcctcttgcgattctgggcctttgccgaggctgaggccttgccatgggcgtctacccactccctgcctctgctcctcttcatcctgtcgtcaatcacttacctcacctgcagccttctggcccacctgctgcagtccaagtcagagctctcccactacaccttctactttgtggactatgttggcgtgagcgtttaccaatatggcagtgctttggctcatttcttctacagctctgaccaggcctggtatgaccggttctggcttttcttcttgccagcagctgccttctgtggctggttatcttgtgctggctgttgctatgccaaatatcgttaccggaggccttatccagtcatgaggaagatctgtcaagtggtgccagcaggtctggcttttatcctagacatcagccctgtggcacaccgtgtggcgctctgtcacctggctggctgccaggagcaagcagcctggtaccacaccctccagatcctcttcttcctggttagcgcttatttcttctcctgccccgtgcctgagaagtacttcccgggttcctgtgacatcgtgggccatgggcatcagatcttccatgcatttctgtccatctgtacgctctcccagctggaggccatcctcctggactaccaggggcggcaggagatcttcctgcagcgccatggacccctatctgtccacatggcctgcctctccttcttcttcctggctgcctgcagtgctgccaccgcagcccttctgaggcacaaagtcaaggccagactgaccaagaaagattcctgaggctggcaagtggggcaacgtgtggaggaagcccctcataatttggagaaaacttgatacaatagaagctgacttttaaggcattggcttttaaattaatacatatatccaaggatatgttatagctgcagtgtttgaaagccaaaggatttaagagttttgttgttgttaataaaaggaatactccttttccttttggatcatagcttaacaaggcacaggaagggaagggatcttgactaagattcatgagacattgaattaaggagaatcatcttcatgcctgaaaatttagcaaaattccgactatggcctccaggggcaattcctaaaagctgaatggataataaaattggactggaaagtaagtaggtggctggtcctcaccctgttggaatggctatcctactatgctgttctttggtaatggaataaattgacccaaggaccgaatttcatttggatttcaaattgtccagagtggaaaagccttcaagatgacatgatgaattactcagttcatctgatttctggtccctcctttctcgacaactataatactaacccttttctcaggataactgtctacacctggcagttttctctgacgtgctgttcactcacatccctaccttgcatggtaatataaaggactaggaagcagtcatacttccaggaaatgcttggattcatgtggacattcaggaagcttattctcatataatactaatctaaacagtactagaaattacagtgccaagagccaccaggaggcccagccaataagcatagatactatatggtatcatgggacccatctattttttaccagtggactacaggattacttgagagttatcagggctgcctaacagaccaggagatctgggggttgcaccagggaatcgccatatttgaccagcatgttttaaaagctcttggtaggattagttggttctaaggatccctctagggacctcattatttcaagaggaacccaaagtccagcctcctacatagatgctgccccacgaaggacccacaaaactaacctagttcagggttctcaggcaggcagttctgcttcagcttagagcagaacccataaaatactcaagtactgggataggcaagcatgtgtgtttactgtggattggtccctgaaggctcctttgggtgagaacatgtgaaccaggcaccctggtttgtttggagcattgctgcccagaagcttctatgggataggtggtgcttgggattgatgtgttgtggccatgcagccctccctgaggattgacttctgcactaatccagtgaaggaggctgtgtcaaaagaagggctcagaagccctcttttcagaggcaatgattcctgtcagtatgaggtcccttagttactaaaaagggacatgatttaactccagtttgatgaacctcctccgagtttactttattgtcttcaaatcttttgttttcttcctttttgtgagatttgtgggttttgtgccttataaatggaaatgtatgaacacaatatatgctcatgtagaattttctgttctgggttattgggataagaaaaaatatatattgctcttcaactagtgaatgaaagaaacttcagaaagctagaattgcttatcaatcaaaagactttctcaatctattttggccacaaacaaacatattcaactgaagctttccaataatctttatatcaagaaagcatgcgtcttgtcagctacattgttttcttagatggatttctcctgttaatcctcaaatatctgaacttctgtgttacccaagtgtcttatacaagcttctggtgtctaggacaaatttatggcaaataaaattagcaaaactgaactgggttgaactgaacaagaggatgggggaattgtgcaaatacgttgttagtagaaggtcaatttaaaatagggactagaaattatttgaagttttctttattacggattcaaagacttattttgaaagttggaaggagaagggagggaagagagcagaagggaagaaggtgtaagtcaagctcttgaatataactggtggtattgtgggcagagatctttagttcaaatccacgtattttttaaaagagagaaccggaggtagagcaatgatcagatgggtgcacagaccagtgccaatctgaacattgttaatggcctgtgacatgatgagcacaggaacaggcatgaagatattgccatacaattttaatttatacaagtattggcccctcaagtggttggaaattttttttttaatctctttttctgagacagggtcttactctgtcgcccaggctggagtgcagtgatgcaatcacggctcactgcagcctcgacctccccagctcaagcaatcctcccacctcagcctcctaagtacctggtactacaggcgcgtgccaccacacctggctaatttttgcattttttgtagagacagggttttgccacgttgcttaggctggtcttgaactcctgaactcaagtgatccgcccacctcagcctcccaaagtgttgggattacagacattagccatcacgcctgccctagaaacagttttttaataggagatatttgagaggcattgaggtaggagactctatgacatgccctcagaatatcagaatcttcttagaaataaactaggaaatgcagatgtttttaactactcagacttttgaggaattaatccttttaaaacatttttgttaaagttagtgtatcagtaagaaacagacctagtttaaaaggaataatcaacaattttataaaggagatggcttattcaaccatagcccctccaacatatctactggaaattctgctggttaactttatctctctctctcttaatttagactttcaacctatgaaaatgtaaatacctttgaaaaaactaaactatcagtcatttacatcctctcatgaatgaaatgcagtgtagggagaggagatggcaggacacagcaaacaggacacatttgcctgcttctctcttgcctaattcttcctgacctgtatttactgatgcttaataatacttgtaagactctaggggttcatttcccatttcagcggaaagtacttcactcaacaacaatattctcaagagtcttctactggaagctagaaagaaataggaatttaagtccatagaatgaaggtagttattcctgcctgtgttgcccacctgttcacaaaaagtacctttatgcttgaaaacattaggttctttggttactgcactgtagtttcaaatggatcctccagatggcattcatgtcttactcagaaagggcactgccattgtccccaaggcttctgtctactaattctattggtcttgtgttttgcttgcttggcaaaaaaaaaaaaaaaaaaaaaaaaaaaaaaaatggagctattttctgtctatataaatctacttatatgaataaccattaaagtgattttgtatatgcaaaaaaaaaaaaaaaaaaaaa

SEQ ID NO: 2200 - DNA, 6279 bp, Homo sapiens
gtgtgtgtggaggccagtatgaagctgaaaaagcaggtgacagtgtgtggggctgccatcttctgtgtggcagtcttctcgctctacctcatgctggaccgagtgcaacacgatcccacccgacaccagaatggtgggaacttcccccggagccaaatttctgtgctgcagaaccgcattgagcagctggagcagcttttggaggagaaccatgagattatcagccatatcaaggactccgtgctggagctgacagccaacgcagagggcccgcccgccatgctgccctactacacggtcaatggctcctgggtggtgccaccggagccccggcccagcttcttctccatctccccgcaggactgccagtttgctttggggggccggggtcagaagccagagctgcagatgctcactgtgtcggaggagctgccgtttgacaacgtggatggtggtgtgtggaggcaaggcttcgacatctcctacgacccgcacgactgggatgctgaagacctgcaggtgtttgtggtgccccactctcacaatgacccaggctggatcaagacctttgacaagtactacacagagcagacccaacacatcctcaatagcatggtgtctaagctgcaggaggacccccggcggcgcttcctctgggcagaggtctccttcttcgccaagtggtgggacaacatcaatgtccaaaagagagcggcagtccgaaggctggtgggaaacgggcagctggagattgcgacaggaggctgggtgatgccagatgaggccaattcccactactttgcattgattgaccagctcatcgaaggacaccagtggctggagagaaatcttggtgcaaccccccgctctggctgggcagtggacccctttggatacagctccaccatgccttacctgctgcgccgtgccaacctcaccagcatgctgattcagagagtgcactatgccatcaagaagcactttgctgccacccacagcctagagttcatgtggaggcagacatgggactcggactccagcacagacatcttctgtcacatgatgcccttctacagctatgacgtcccccatacctgtggcccagatcccaagatctgctgccaatttgatttcaaacgcctgcctggtgggcgcatcaactgcccttggaaggtgccaccccgggccatcacagaggccaacgtggcagagagggcagccctgcttctggaccaataccggaagaagtcccagctgttccgaagcaacgtcctcctggtgcctcttggagatgacttccgatatgacaagccccaggagtgggatgcccagttcttcaactaccaacggctctttgacttcttcaacagcaggcctaacctccatgtgcaggcccagtttggcactctttctgactattttgatgccctgtacaagaggacaggggtggagccaggggcccggcctccagggtttcctgtgctgagcggggatttcttctcctatgcggaccgggaggatcattactggacaggctattacacttcccggcccttctacaagagcttagaccgagtcctggaagcccacctgcggggggcagaggttctgtacagcctggctgcagctcacgctcgccgctctggtctggctggccggtacccactgtctgatttcaccctcctgacggaagctcggcgcacattggggctcttccagcatcacgatgccatcactggcacggccaaggaggctgtggtggtggactatggggtcaggcttctgcgctcccttgtcaacctgaagcaggtcatcattcatgcagcccactatctggtgctgggggacaaggagacctaccactttgaccctgaggcgcccttcctccaagtggatgacactcgcttaagtcacgacgccctcccagagcgcacggtgatccagctggattcctcgcccaggtttgtggtcctattcaacccactggaacaggagcgattcagcatggtgtccctgctggtcaactctccccgcgtgcgtgtcctttcggaggagggtcagcccctggccgtgcagatcagcgcacactggagctctgccaccgaggcggtccctgacgtctaccaggtgtctgtgcctgtccgcctgccagccctgggcctgggcgtgctgcagctacagctgggcctggatgggcaccgcacgctgccctcctctgtgcgcatctacctgcacggccggcagctgtccgtcagcaggcacgaagcgtttcctctccgtgtcattgactctggcaccagcgacttcgccctcagcaaccgctacatgcaggtctggttctcaggccttactgggctcctcaagagcatccgaagggtggatgaggagcacgagcagcaggtggacatgcaggtccttgtctatggcacccgtacgtccaaagacaagagtggagcctacctcttcctgcccgatggcgaggccaagccctacgtccccaaggagccccccgtgctgcgtgtcactgaaggccctttcttctcagaggtggttgcgtactatgagcacattcaccaggcggtccggctttacaatctgccaggggtggaggggctgtctctggacatatcatccctggtggacatccgggactacgtcaacaaggagctggccctgcacatccatacagacatcgacagccagggtatcttcttcacagacctcaatggctttcaggtgcagccccgacggtatctgaagaagctccccctccaggccaacttctaccccatgccagtcatggcctatatccaggacgcacagaagcgcctcacgctgcacactgcccaggccctgggtgtctctagcctcaaagatggccagctggaggtgatcttggaccggcggctgatgcaggatgacaaccggggcctaggccaagggctcaaggacaacaagagaacctgcaaccgtttccgcctcctgctagagcggcgaaccgtgggcagtgaggtccaagatagccactctaccagctacccatccctcctcagccacctgacctccatgtacctgaacgccccggcgctcgctctgcctgtagccaggatgcagctcccaggccctggtctgcgctcatttcatcctctggcttcctcactgccctgtgacttccacctgctcaacctacgtacgctccaggctgaggaggacaccctaccctcggcggagaccgcactcatcttacaccgcaagggttttgactgcggcctggaggccaagaacttgggcttcaactgcaccacaagccaaggcaaggtagccctgggcagccttttccatggcctggatgtggtattccttcagccaacctccttgacgttactgtaccctctggcctccccgtccaacagcactgacgtctatttggagcccatggagattgctacctttcgcctccgcttgggttagggcttcttgtggcctgaagagaaagttcattcacagagactgcctcttaacatgaagatcattggacaagccacacgggtatcccatcccgatctgcctcccagaactgtgacacactgggctctgccctcattttctgtttattgctgctgctgtgttttcggcgcaacccacaaacccagtgatgggtaaatagggcagacgccagtgagatcagggagagaaggcccttggtcagagtgggcagtgccaggctctgctttgggttgtgagtggacacccaactgggcacaggctcaggcacccatcctttttccaaacagggatatagaagtggtggaagcagacagaagaggtaagggaggctaagtgggtaacagcccagcatcagggtcactgtggcaacagcaggctctaggggaatcctgtggttatgtagagactccatgtcctggtgtgatgagcaggatcagagtgactctgggaggacaggggtggggacccagagttagcagtggggatggagcagtagaaggaatcactgtttctcctaggagtctgaaggcctcgctgctttctgtgatggctttgcagtaagtgccgcctggcctgcatgcattggctaacaggctgcagaatggcaggaaggactcgctagagattgtcatggccagagatcataggtcacttcaggtagcaagacccctggcaaactgggcacttggcctatgtactgatttgtgggatggtggcaggggtgtggggtccttcaccctgcctgaattctctttggcttctgtgctctgtatgctgctgtccccaagggctctttcttattatggcagggagtggggattggtcctactttctttctctggaaaggaaagcctccaagactccatgtgcttgggcagcttgagaaggcgttcagcaccacgcctagcaggcagaccttgaagcctcacctttagtctatctgcagaggtattcagttcctggcacaggggactaggggcatgtagagtatatgaggaggcagtatggctgtgcaggagccttcatttcagcttcaattaatagggaagaatttatgatagctctatagatgctgaaaaggtatttcgtaagatttaaaatccatcccttattaaaactcttagtaaattaagtctggaaagaaacaccctaatctagataaaggtctgtttcagaaaccaacagtgatggcattctaaagagtcagacgccacaggcattcccattaaagtcagaaactagccaagggcaagctattattcagcagtgtcccggcactactaacccctgcaacaagccagatgaggaacataaggaagaattataattgtcattatttgtagacaataaaactgcctacctgtaaaacctaagaatcaactgaagacctgttaagagtattctgtaagtcaacccaatgatacacatcatgttcctgtccacatactggttttccccaaatcagctgataaattcagtgtaattccaatgagattgaaactttggaattgacagttctaaagtgcatttgggagagtgaatgtgtgagaacactaagaccactctgaacgatgataatgagttggggggtggactgctcgggggtgatcctgccagattcccagaggattctcacgccaccattacctcactcagtgtgacctggagggggtcagacagacgggagagtccagaaacagacccagggctacaggaatttagtatatggtaagagggatgttttaagtggggaaaaaggtggattatttaataaacagcacttttagacaactagctatcaaagctagatctcagctgggtgcgatggctcacgcctgtaatcccggcactttgggaggccaaggtgggtggatcacttgaggtcaggagttcgagaccagcctggccaagatggcgaaaccctgtgtctactaaaaatacaaaaactagccaggaatggtggcgcgcgcctgtaatcccagttacttaggaggctgaggcaggagaatcacatcaacctgggaggcggaggttgcagtgagcttagatcatgccaccatgccactgcactccagcctgggtgacacagccaaaaaaaaaaccactaagttagatctctacctcacagtgtccatacaaattagttccagagggaagatataccacaaaattactcaaaaatttttatacctctggtgtgggacggtcttttctaaactttaacatgagacttaaaagatataataagggaaaagataagcagatttcgcaaccaaaaaatatcgaaagtctctgtgtgatggaaaacatcaaggttaaaacacaaatgacagatatggaagaaaatatttgcagcacataaaaaaatcaacgagtacaattactttaggagaaaagcttgcttcagggtccttagagaaagtcactggggcctgccaagctgccacctaaagacaagagtgagagggctgagttcttccaggtcatcagagttgttgctgcccgtattaggccacacagtggaaccccatttatatcatagcagaagaaataggattatcaatgtgaactgcttagcatggtgcctggtatatacgagagctccacaaatgtgagctataatcctactagtaaaggatgctaagcagttccactgtggcaggtgtcatttgctagtagaatttgtaatcaaacaataggaggggaatctgtgaacgcctagaaaatgagcagaataaaggatattatctttggaagtcttaaaaaaaaaaa

SEQ ID NO: 2201 - DNA, 3319 bp, Homo sapiens; identical to SEQ ID NO: 1705

SEQ ID NO: 2202 - DNA, 7011 bp, Homo sapiens
ggggccactcggagtcgcccgagaagccactggaagggaacacctgcctctcccagatgcacagctgggctccgctgaaggtgctgcacaatgactccgacatcctcttccctgtcagtggcgtgggctcctacagcccagcagatgcccccctcggaagcctggagaacgggacaggaccagaggaccacgttctcccagatcctggacttcggtacagtgtggaagccagctctccaggccacggaagtcctctgagcagcctgttaccttctgcctcagtgccagagtccatgacaattagtgaactgcgccaggccactgtggccatgatgaacaggaaggatgagctggaggaggagaacagatcactgcgaaacctgctcgacggtgagatggagcactcagccgcgctccggcaagaggtggacaccttgaaaaggaaggtggctgaacaggaggagcggcagggcatgaaggtccaggcgctggccagagagaacgaggtgctcaaagtccaactgaagaaatatgtaggagctgtccagatgctgaaaagagaaggtcaaacagctgaagtgccaaatctttggagtgttgatggagaagttacagtagctgaacagaagccgggagaaattgctgaagaactcgcaagctcctacgaaagaaagctcatcgaggtggcagagatgcatggcgagctgattgagttcaacgagcgcctgcacagggccctggtagccaaggaagccctcgtgtcccagatgaggcaggagctcatcgatctccggggaccggtgcctggagatttgagtcaaacgtccgaagaccagagtttgtcggattttgaaatatcaaaccgggcgctgatcaacgtctggatcccctcagtgtttctccggggcaaagcagcaaatgcattccacgtgtatcaggtctacatccggataaaagacgatgaatggaatatttatcgccggtatacagagttcaggagtttgcaccacaagttacaaaacaagtaccctcaagtgagggcctacaacttcccacccaaaaaggccattggaaacaaggatgccaagtttgtggaggaacggagaaagcagctccagaattacctgcgcagcgtcatgaacaaagtcatccagatggtccccgagttcgctgccagccccaagaaggagaccctcatccagctgatgcccttcttcgtcgacatcaccccgcccggagagcctgtgaacagccggcccaaagcagcttcccgcttccccaaactgtcccggggtcagccccgggagacccgcaacgtggagccccagagcggtgacctctgacctcgacaaaaccgcagccacgggccctgtgcgtggcaccagctgcgtccaccccagccactgccgctggcccctcacctcagcgtgacaaccacgtccacctggtgatcctgagagcacacgattcccaacagttacacaacaccccgattaaactaatcagtcttcgagccgcatgataccgtgacccgagagaccaaggcagcacctcgctggagagactgggacacacagtccttctgcttctggggtctaccctgggctgcaagggctgttcctccacctttctgtagttcagggctggcaggagggtgggcaccaggtcaggctgggtgcgccatggttgagaggcaaaggtgatcccctatataggaaggttcatgcagagccagcctctccactctttcccacgtggggactagaatgactattagcctctccttttgctttttaaggttattacctggcctaacctagggatggctggctttgcgggggggggggggggggggggcatggttcctttcactgcattttccaccaacagtcattagacacctggcactgtcacagctcacttttccagagggatattcctgtggctttggcaaggagccattagtgatgtgcaacttgagttcagagaacttcccctacctcccccatggctggcttcaggaaggaccagtgccctccatagcctgaggccacctaggccctcgccaggcttggagtggggggactcagacatctggcccagccatcagcagcaacctagtaacccggcgtcatccagcgtgtccaaagtagcattggccctacagtcatgagagacttgggtcagggaaccactgcagaaggttccagggttttcaaaccaggctccatgactatgaagttggacccagtgtggacacttaacagatcatgtgtctctccactaaaaacattttccatcccgtctgcccccgacattgtccttgataacagaactctgcatcccctaagacagagtcctctgttcctcccatgtcaggtggctctcagagtacagggaccttggcaggtggagaggaggatggggaccagcagctgggcagcccccagggctcctcctccagtgagctcacatcagagcacctcacagagcaatagccgtcctcagatgctcagcaaagttgtggcagtttgcatttctagggtaaactaactaggaaggatgtcgtgaaatggactatgcaagagtaagtttgtgtgtttcgccttaatctgaggcagagacacagcagaacctgaggagaaaagcaggtggaaggtgacggttagatggtaagccatgggcttgtcctggaactgcttcaactcagtggcttaaaatgagaactgcccaggtgagcatggagcatctcctaggctcgaggacatctctggagaatcatctggaaggtttatactgtgccttcccctcgtagcaaaaaggaagattgttcatggcctttaaggaaggctgagatcactcacacacagcgcccccccaccccagagaaaccgagtcagcctacatgacttccaaggggacctggggccagataagccctgccccggtgagaccaaatgagctggagcatgtatggaggtgcggaccctgcagtcagtttgcgagtgtggaggacccgagacatcctgtaaaggcaacttggtctccctcccactcacctgccaacattgctgcaatacacatggtttatctgaaattccaaggccagagtgcacatcagctcacatgactggcaactctaaatagagagccctaatggactgaggcaggaaacgtctaaaagctcaatctgctgtatgtcatgaccccttaggttgggtttatgccacatcggtcattttgaagtaggtgtttgatgccagctcagagactgtctcaggagtgcctccctggcctgggtagctaccctggaggtcatctccctgttctctgttggataaaggaacctcccccatctgtgacattcccttgggcccaggcttatgacctgcaccttttctgacacctgcccccaaagcacaggatgtgaattggtctctctccagataccccacgaggaagcaccttggacattctgcacatgataataatgcaacagtcccccattgctgagagatactaacccgtgagaaacaagtatgctctcagctggtattgaactggtgggagaaactgcctcctacttttataatactgaattattcacaaaaaacctggtctgctctccaaaatgagagcatgttcctgggagccacatggggaccatccccagctgcctgctcctggtacctcccccatgatcatgcacagaccgtagagtcgagtcatctcgcagatccagaccatctcctctcattctcactctaaaaatgctggtggcccgcacatgacagcaactccccgaagccttccctttggaatcccatagaatgttctgcaatgattgggtccatcttgctgctcagaagaatcccgtcctgctctctagtgtggtgggatgaacttcaggcaacaaacaactggcagggttcccagttcctggagttatggagcagaaacacccaggcctagcagaattgtggctgaaacctggtgcccaaattccacaccctggaaatgtgtcaactgcctgtcagcctggattcaattctgagggctaagccacgaccttatccatgagtggcgaagacacccctgaggaaaggattgcttgcacctcacatctgtcttcttctaagattactcggagattttcaaacaacatctgagaacagaagccccctcccctactcagagaggaacgagggtggcccacctctcaagggccttggattcctgggaccaccctttgctgggaggaagaatccacaccgaatccttctgtcttcatggcctgctgtgctgaaacagaacagcaggttccatctttcacatctttttttctcccccagatgaaagacgactcaggaacggtagggctgggcagaggtgtctctccttgagagacaacaaaagcttctaagggagggagcttaaaggctgctagaaacctagcccaaccatccactcctgatctgagacagaaccttctccgccactcttcctgcaatcagtgtgaaattccagcttctttgattcccacttagcagtatgctccaatcacgttgctggcaaggcattttagagtttggagctgaggttcaaagccccctgcatttctctactggcaggccctggtgaaggaagacactttcagggaagaggctcttacagtctatggtggtagccatcttcacatccagtcaccagttgcatctagggagctgctggctataaaagggatcatccagtggagttgtaaacaagggaaccatcttgcaagatctaggaagaggaaggggagggatgtggactgggtctgatcacagcccttggccctgcttcatactttggagcttattaagatcaattttgataaccatgtaatttcttagaaccatggcaggtagtattgtgctttaaaaaccagaggctcctgaaagtcgtttacaccaggtggattgataccatggctgtagctgatgcaactaacaagtactggggccagtgatcacaatccaggttggaaacaggagtgaagcccaccagcctgcctggttgatggacagcaggctctgccttctggaggcggcttatatcccaacagcctgaggcagggctctgtggcccaggccggcagtggctgcctctcttggttctgcatggtacattttgccaaccctgaggaccagttcttggggttccaggcctcggccttcctgctccacgtgctcaagcccccacagggggctgcgacaccatctggctcctcacagggaggtccagccatgttctctgggctcccagtgagccccctcccctccggctacccccagaatccatccttcattcctccaccaagctcctgtgtgagctgcagcacccacacgggggaagccctgcactccagcagcatcttccagccttggcacagaactgatggcaaaggaagggctgggttttcagcttctgggacccgaggaagaccccacctcactcctccttccccagtacatcagactggttaggaggcatcccagaaggggcagcctcatgcccaggtttcagccctaaaggtaatgattgtcttgactctgccttggcatttcgctcggaatcacggcagacttggagtgtttcttcaaggcaggcatctgcttatgagcaaggtcaaagatttttcaaaatattgtgcattaattcattaaagctactgttaaatatttgctgtttttagattggcgtccgtgctaattctgcagttgtagcactgtatattttatctcatttctgtgccaagaaagttcatctttatgtttttctaatacacaatcttgatcttgtttccaaaataaagcttcagctccttggtcaatagaagtaagggtgtagccatccagggtctcccggctctaggcagaccggatcccgcagttcatcccatggttgttgaaatgtacctcgatcagtcatctctggtattcctcactctagccatgagccattgccatcttatgggcccgatttgggtactctgaattatgtcatggagtagacagttacttctaaatcccagcaaccaagttgcgtatccttccttatagctagtttctatagagaagtgaaaaagaaatctggcttccttaataagatagttgagcctatgacattaaggagcagcgctgctggcggaagattctagattcactggtggtttaagaggcccagggatttagttcttactggtgcgtaagtgttttcccatcctaaccggaaaaccactcacccaggcttcccccacttcccctcaaattttctcagctctgccgctggtctccatgaacggcaaggggaaccaccactcattcactgtcagtgtaggtaagacagaggatgcccttgcaaaaattgggactgaggacagtagcacacggaatggtggatcgtacatttgcacccagagctactaaacgctcagtgaccccagagaccattaatttcccggagtgaaggggatgggggtagagctaattggaatttttattatccaggactcatcctaagaagaatgttggcctctcttcatccctggcttagccgtcaggtagaacgcttactcacctgacaccgacttcttagagaagcgagtcttttttgaatggaggagcgatggtaaccccactagggggcgcccatgatcggctcccagtgcacccccttaagggtaagcaggccacatatctagagtctgatagtctgtgtgtacataaggtctagaagtctgtggaaacgccctgaaacctgtagtattatcttaactaccctcttatgttaaggtttacataataggatttttaaacaaatgtgtttaattttttaagatctcttgtattaaaattttcttttggaataagctgtggaaattttgttacaacctggttgagatcaacctctttacaatgacacaaattgtgacattttataaattagatacttcagtggaaaaaaaaa

SEQ ID NO: 2203 - DNA, 1976 bp, Homo sapiens
gcttgcctgcaaacctttacttctgaaatgacttccacggctgggacgggaaccttccacccacagctatgcctctgattggtgaatggtgaaggtgcctgtctaacttttctgtaaaaagaaccagctgcctccaggcagccagccctcaagcatcacttacaggaccagagggacaagacatgactgtgatgaggagctgctttcgccaatttaacaccaagaagaattgaggctgcttgggaggaaggccaggaggaacacgagactgagagatgaattttcaacagaggctgcaaagcctgtggactttagccagacccttctgccctcctttgctggcgacagcctctcaaatgcagatggttgtgctcccttgcctgggttttaccctgcttctctggagccaggtatcaggggcccagggccaagaattccactttgggccctgccaagtgaagggggttgttccccagaaactgtgggaagccttctgggctgtgaaagacactatgcaagctcaggataacatcacgagtgcccggctgctgcagcaggaggttctgcagaacgtctcggatgctgagagctgttaccttgtccacaccctgctggagttctacttgaaaactgttttcaaaaactaccacaatagaacagttgaagtcaggactctgaagtcattctctactctggccaacaactttgttctcatcgtgtcacaactgcaacccagtcaagaaaatgagatgttttccatcagagacagtgcacacaggcggtttctgctattccggagagcattcaaacagttggacgtagaagcagctctgaccaaagcccttggggaagtggacattcttctgacctggatgcagaaattctacaagctctgaatgtctagaccaggacctccctccccctggcactggtttgttccctgtgtcatttcaaacagtctcccttcctatgctgttcactggacacttcacgcccttggccatgggtcccattcttggcccaggattattgtcaaagaagtcattctttaagcagcgccagtgacagtcagggaaggtgcctctggatgctgtgaagagtctacagagaagattcttgtatttattacaactctatttaattaatgtcagtatttcaactgaagttctatttatttgtgagactgtaagttacatgaaggcagcagaatattgtgccccatgcttctttacccctcacaatccttgccacagtgtggggcagtggatgggtgcttagtaagtacttaataaactgtggtgctttttttggcctgtctttggattgttaaaaaacagagagggatgcttggatgtaaaactgaacttcagagcatgaaaatcacactgtcttctgatatctgcagggacagagcattggggtgggggtaaggtgcatctgtttgaaaagtaaacgataaaatgtggattaaagtgcccagcacaaagcagatcctcaataaacatttcatttcccacccacactcgccagctcaccccatcatccctttcccttggtgccctccttttttttttatcctagtcattcttccctaatcttccacttgagtgtcaagctgaccttgctgatggtgacattgcacctggatgtactatccaatctgtgatgacattccctgctaataaaagacaacataactcaagtctggcagactttcttctctatttctggatgaatgcccagtgagactgtgttgtacagctagaaaaggccttcttcccaatagcaaggctgtgcatctagcctcaagctctggctgaactttgtggtcgacatcaatctaaagatacagtgtctgactataaccttgttccaaaaacctaggcaaagagtatatgtaggaggtgggatatcacttccatgacataagtgctattgcagagccgtggccacccaggaactcctgactgctttcc

SEQ ID NO: 2204 - DNA, 5168 bp, Homo sapiens
gactggcttcgggcggcggccccggcggcctgtggacggacgggtgggccgaggtacaggccccacggccgccgtctcccgcttctgcccgcgcagagtccgcgccatggccgcctcgccgggctcgggcagcgccaacccgcggaagttcagtgagaagatcgcgctgcacacgcagagacaggccgaggagacgcgggccttcgagcagctcatgaccgacctcaccctgtcgcgggttcaatttcagaagcttcagcaactgcgccttacacagtaccatggaggatccttaccaaatgtgagccagctgcggagcagtgcgtcagagtttcagccgtcatttcaccaagctgataatgttcggggaacccgccatcacgggctggtggagaggccatccaggaaccgcttccaccccctccaccgaaggtctggggacaagccagggcgacaatttgatggtagtgcttttggagccaattattcctcacagcctctggatgagagttggccaaggcagcagcctccttggaaagacgaaaagcatcctgggttcaggctgacatctgcacttaacaggaccaattctgattctgctcttcacacgagtgctctgagtaccaagccccaggacccctatggaggagggggccagtcggcctggcctgccccatacatgggtttctgtgatggtgagaataatggacatggggaagtagcatctttccctggcccattgaaagaagagaatctgttaaatgttccgaagccactgccaaaacaactgtgggagaccaaggagattcagtccctgtcaggacgccctcgatcctgtgatgttggaggtggcaatgcttttccacataatggtcaaaacctaggcctctcacccttcttggggaccttgaacactggagggtcattgccagatctaaccaacctccactactcgacacccctgccagcctccctggacaccaccgaccaccactttggcagtatgagtgtggggaatagtgtgaacaacatcccagctgctatgacccacctgggtataagaagctcctctggtctccagagttctcggagtaacccctccatccaagccacgctcaataagactgtgctttcctcttccttaaataaccacccacagacatctgttcccaacgcatctgctcttcacccttcgctccgtctgttttcccttagcaacccatctctttccaccacaaacctgagcggcccgtctcggcgtcggcagcctcccgtcagccctctcacgctttctcctggccctgaagcacatcaaggtttcagcagacagctgtcttcaaccagcccactggccccatatcctacctcccagatggtgtcctcagaccgaagccaactttcctttctgcccacagaagctcaagcccaggtgtcgccgccacccccttaccctgcaccccaggagctcacccagcccctcctgcagcagccccgcgcccctgaggcccctgcccagcagccccaggcagcctcctcactgccacagtcagactttcagcttctcccggcccagggctcatctttgaccaacttcttcccagatgtgggttttgaccagcagtccatgaggccaggccctgcctttcctcaacaggtgcctctggtgcaacaaggttcccgagaactgcaggactcttttcatttgagaccaagcccgtattccaactgcgggagtctcccgaacaccatcctgccagactccagcaccagcctgttcaaagacctcaacagtgcgctggcaggcctgcctgaggtcagcctgaacgtggacactccatttccactggaagaggagctgcagattgaacccctgagcctggacggactcaacatgttaagtgactccagcatgggcctgctggacccctctgttgaagagacgtttcgagctgacagactgtgaacagaaggcagtggaacagaagaatgtttttctgcaacagccaaaatagaatggaatagaatgaagccagctgataccacgggctttcgttatcttgacatagaaggaagcaatgccacggctccagggtttcagatgagatcccatctcagacactgtggcttcctccagatcacacagctttgtactgcctctcccgcctgtggccaaagtcgtgttgcagcaggcaggctgcttggagcttcccatgaactggaaagctcacctccactgcatctttttactggccatccagtcagccgatgtgtaagagtaggaaatactgtgtcactggaggcctccgtagcattgtgtagtgtgctcagaaccactgatctccgtccgcaccgaaggcgggcccggagtgggaggctcggcctggggcggcggcaccggagagggcacctcgatgcctgctctgacctgacccagagggcgaggccctccagcgggggacattcccaggctgagtggaccccacggctctctcccacgcctggattacgacatgaagtttttaccacaagcccgagggcaggcttgagttaggcagactgaaggctaattttcattttctcccagctggtttctgctgcttcagaaaagtacaccttttccttatggaccagaggaagaggaagaccattttatcagtcactgaaaagagtcccctggcactgatgagcctgaagagaactgtgctcctcctcgggggctggggaaggaagacagggactgcaggtgtctcatactcagtggcctccagacaaactccagacaagcacagacctccccactaagagcagccagagggagctggtgaggccctaaccccacccaccgagcaactgagcttccccatccctccccagagctgtgtctctgtgggctgggagtctaatgtcacccccctagaccgtaagctccttgagggcagggacagtgccttatcattgttgaacccgtagcacctaacacgtgcgtggcagcacagtcgtgtgctggagtgagtgctgcagaaccgtgcgtgcagcgcatgatgaatgagtgcgtccgccatgccgtaaggcaggctcacctgtagctatccccttccctgccagatcttctcagagctttagcttttctagcactcgtgcctatggtgaagcatgcactttaatatgcttttaacactaggtgaccaaatcacagtgaagccgggcactgcattctccttgggctgtgctccacgcgggtgggtgggagctgtcttctgagtacatccggaagggctgagcaggtgagtgccctgagcatcctggctgggccccacccaggaagatcttccttctcagatccacgtttggctctaaattgcttcaagtagagattcattctttgaggttgaaaaaatagtttatagtaaaacgaaggcctaattcatggaagcatcattagtcatcaataccttctcataaaatagatgggccagatttccaccaccgcctgcctcctctaacttgggtgatgccagtaggtttgaagggggcagagcactgcagggggaggggggggtctaggctgtgagaggacagggtggagaggaggagaaccctgaaggagagacggaagatgccaggacctttgcttggacagccattgcccttccaggagaccctggagtgtactgagggttgctggactgttccacccagaggagcaaggctgtacaatgagggtctgaatctggcacacctgtcccttatgtaaaaggagtcgtggtcacaagaccctgggctggttagcctctcccgacctcattccatttctatcttctgaccttgcctctcatctttaaaataaccctcatggggtgcccctccaccttcctctggaatccaagtattcctgtttcacatttgccccaaatctttgctgtggaattgggaaatcaaaccagagtcctcctcgcctgatttccagctcaggaagggcctgctggcctgccctgttcccagttacactttcagatccctttgtgctcaagatctcagagggggtggctttttgttaaagagccttcagtcgcaatgctacccagcaccccatgtgccaaaagaaaccagctcctgtgtcaaagggcttccaaacctgatctcactctcaacaggcgatggtgctgatgtttcaagaattgtgtttttataaaacagaggtctcagcatagtcactcttcacatagtgccttacccatgggtatcgtcatatccgggtcccagttcagtttgtctgcacagcagccaccctgcctggcaacagagaccccaagacctacacagtgaaccctactgccccaaaggcgttctccaggtgacttgtgaaaacagacctccggggaagtgatttattgggggtgtacactgggggcaatatggtttagcactgaattcaatttgtccttaggtctatgagtgagtccgatcttttcttgtgaaaggttttgggcatcgtacaacccactctgcctagaaggtgtggaggactcaccacgggcagggtcgccctggcccacagcacgtgagcctgcactcactgcggcctttgtaacaaaaccagttgtggtcctcagcatttgaagcagctgcatacttcagagtaaactatttttcattatttagttttgtcacaagaaatcgaccattgtactactctcacttacagcagttaaacagcatagaactaaaaacctgtctgcatttccattttttctttctgtatggttgtgggttttaggacatagggggttaggagaaggggtttcttgatcatgtcatgaattctcctttgtcctgtttctcctgtttcatttctcctccgcctgctgtatattacctgagctggtgttgtatcttcaagtccatatgcgtatttgcagacctttcctgttcccactcttgttggctcttctgatttatgcacagatggttcccagcatgtgtccagtgcttcatggatgggaccatcccagcaactaatcagacttcctgccagtgtcctaacccccagggcaccctgttcaaccatatttaaaaattggaatttgtataaagttgcttccaagttttataatgcatcattttacatcttttgtaattaaaagcatcacaatgaggttgtctctgca

SEQ ID NO: 2205 - DNA, 1671 bp, Homo sapiens; identical to SEQ ID NO: 34

SEQ ID NO: 2206 - DNA, 1729 bp, Homo sapiens
gcgggcgggtgcgcgcgctttctcgcgcacgcgcgcacggagggggcgacggccgctgtgacgctgcggcggcggcgggcgggcggcggcgcgtgaggcgcgcgatccccggtgtcttgggagcagtgccccggcccccgccgctcccgccgccgccatgtcgggccggtcggtccgggcggagacccgcagccgggccaaggacgacatcaagaaggtgatggcggccatcgagaaagtgcggaaatgggagaagaagtgggtgactgtgggtgacacgtccctgaggatatttaagtgggttcctgtgacagacagcaaggagaaagaaaagtcaaaatcgaacagttcagcagcccgagaacctaatggctttccttctgatgcctcagccaattcctctctccttcttgaattccaggacgaaaacagcaaccagagttccgtgtctgacgtctatcagcttaaggtggacagcagcaccaactcaagccccagcccccagcagagtgagtccctgagcccagcacacacctccgacttccgcacggatgactcccagcccccaacgctgggccaggagatcctggaggagccctccctgccctcctcggaagttgctgatgaacctcctaccctcaccaaggaagaaccagttccactagagacacaggtcgttgaggaagaggaagactcaggtgccccgcccctgaagcgcttctgtgtggaccaacccacagtgccgcagacggcgtcagaaagctagcaccatcccggccctccgcctcctggccctgcctctatttattgcattctggttctggccgcgccgcgttgctggggtaagggcaagcactggggtcaagagcctgcacacatgagccttccgggctggaaggctggcgtaggacttggggctgtagcatcatcttcctgaccctggcacctgtgtctacttgctcccgagaagaggagcgctcatgtcttttttgcaccccaagttggctggagcatcggccaccccaagattcatctgtgacctccaggcagcagtctctgctccagaatctctggacggagctgctggcagcttctgcgagaagagagagatgtggaaggcaccttctagaagagagcgtgcctcaggttacttgaacttgaacggagactgtagactcccggactttcccctaggactgggggccctgtaggctgctgttggaggactgggtagagacattggagggaagggaagggcttttctccacacaagggcagagagtccgtctagatttcttgctgtcctgccagctctgcccatgcctgaggtggtcctacctctcacgggcaccctagctgctgacagccctttgtggccgccgtccccatcccctgccctcagcacacacatctgcacacacgcagctttgttctcacctctacctgtcattccagcatccctgcctcttgtcacaaactgccccagcaagaatttgaggttctgacaacagtacccatcccccacagtaccccttcagctcagtttctagaaagctcccttttctttgaaatctgcatgttgaattgaactttgtgattttattttttgtttcaaaaaagtttaagaaaatggaaatgggcaacagtgagtgaagacatattttagcactgaatagaatatttttaaaattaaactatttgaaatatgtccaaaaaaaaaaaaaaaaaa

SEQ ID NO: 2207 - DNA, 6650 bp, Homo sapiens
gccccgccgccaccgccgcgccgagtccttttgtccaagatggcggcgccgggggcgctgcctcctcggccgccgcctccgccgccgccgctgtgagaaacctacgggccgcccgcccgccgcgccagcgccatgaagcggcagagcgagcgagactctagcccgagcgggcgcggctcgtcatcgtccgccaagcgtccgcgggagcgcgaacgggaggcggaggcgggcgggcggcgggcggcgcacaaggcctctggcggcgccaagcacccggttccagcgcgggcccgcgacaaaccccgcggcagcggaagcggcgggggcgggcatcgcgacggccgcggcaccggggacgcgaatcaccgcgcgagtagcgggcgctcctcgggctccggcgctggcggcgggggacgcggcggcaaggcctcgggggacccgggcgcctccggcatgtcgccccgcgcgtctcctctgccgccgcctccgccaccgcctggggccgagcccgcgtgtcccggctcatccgcggccgcgcctgagtacaagacgttgctcatcagcagcttgagccccgcgctgcccgccgagcacctcgaggaccggctcttccaccagttcaagcgcttcggcgagatcagcctccgcctgtcgcacacgcctgagctgggccgtgtggcctacgtgaatttccggcacccacaggacgcacgcgaggcccgccagcacgccctggcccggcagctgctgctctacgaccgcccgctcaaggtagagcccgtgtacctgcgtggcggcggcgggagcagtcggcgaagtagcagcagcagcgccgccgcttccacgcctcccccagggccgcccgcgcccgccgacccgctcggctacctcccgctacacggaggctaccagtacaagcagcgctcgctgtcccccgtcgctgccccgcccctgcgggagccccgtgcccgtcacgccgccgcagccttcgccctggatgccgctgctgccgccgccgtgggactgtcccgggagcgggccctggactactacgggctgtacgacgaccgtgggcgcccctatggctacccagctgtgtgtgaggaggacctgatgcccgaggatgaccagcgggccacgcgcaacctcttcattggtaacctggaccacagcgtatctgaggtggagctgcgaagggccttcgagaaatatggcatcatcgaggaggtggtcatcaagaggcctgcccgtggccagggcggtgcctatgccttcctcaagttccagaacctggacatggcccatagggctaaggtggccatgtcgggccgagtgattggtcgcaaccccattaagataggctatggcaaggccaaccccaccactcgtctctgggtgggtggcctgggacctaacacgtcactggcggctctggcccgagagtttgaccgctttgggagcattcggaccattgatcacgtcaaaggagatagctttgcctatattcagtacgagagcttggacgcagcccaggccgcctgtgctaaaatgaggggttttcccttgggtggaccagaccgcaggctccgcgtggattttgccaaagcagaggagactcggtacccccagcagtaccagccctcgccactccctgtgcattatgagctgctcacagatggatacacccggcaccgcaacctggacgccgacctggtgcgggacaggacgcccccacaccttctgtactcagaccgagaccggacttttttggaaggggactggaccagccccagtaaaagctctgaccgccgaaacagccttgagggctacagtcgctcagtgcgcagccggagtggtgagcgttggggggcagatggagaccgtggtttgcccaagccctgggaagagaggcggaaacggagaagcctttccagtgaccgtgggaggacaacccattcaccatatgaggaacggagtaggaccaagggcagtgggcagcagtcagagcggggctccgaccgcacccctgagcgcagccgcaaggagaaccactccagtgaagggaccaaggagtccagcagcaactccctcagcaacagcagacatggggctgaggaacggggccaccaccaccaccaccacgaggctgcagactcttcccacgggaagaaggcaagagacagcgagcgcaatcaccggaccacagaggccgagcccaagcctctggaagagccaaaacacgagaccaaaaagctgaagaatctttcagagtacgctcagacactacagctgggttggaatgggcttctggtgttgaaaaacagctgcttccccacgtctatgcatatcctagagggggaccagggggtgatcagcagtctcctcaaagaccacacttctgggagcaagctgacccagctgaagatcgcccagcgccttcgactggaccagcccaagcttgacgaggtcacacgacgcatcaagcaggggagccccaacggctatgcggtcctcttagccacccaggcaacccccagtgggcttggcactgaggggatgcccacagtagagcccggtctgcagaggcggcttctcaggaacctggtctcctacttgaaacagaagcaggccgcaggggtgatcagcttgccagtgggggggtccaagggcagagacggcacaggcatgctctacgccttcccaccctgcgacttttcccagcagtacctccagtcagcactaaggacattgggcaagctagaagaagaacacatggtgatagtcatcgtcagagacactgcctagcccaagcctgtctttcccagcgtcatgtttgtgtcacaaaagcagttattttaaaatctgatcccctctctaccctaccactttggtttgaattatctcctgggttattttggttcatttgggtggggatcaaagtcctgtccaccaccaaaactaagttcttagattttgggggatttttttttttaaacgatgagaagggaatccggttatgttgatttctagtgtacaagatactgtctgctgtggttctgtatttttttattttttgaccaactgtatggaaagttgtcagtaaaacctttgacagaggatggatttttaaacctgttcagagtcctggtttaatcaatcaagctaaaagaatcgaagacatccctagtgcatgtacacgaatgccctacgtcatccttccagcaccactgctgcatgggtcactctcggcctctcaattcttcaggctcagtctggactctacttacactcatttttatcttggctgacagcaggcaagcttcagtttgggctgtggacgctgccacacaagcctgagtagagcccatgcaaaggaagggatggggtgagcgcaaggcctgtggtcagcagctactgatggttttttctgccttaaaccgtgtgtgtgtccatcatcatcagtttgagctgtggctgtttgtttgggacagagtgcccactcagcatgtttggcagcaggtagccttcagcagctgtgtagtcttgtacaaggagaagctgtgcactgttgatgccagggggtctcggggcccctgatctgtccaggctcctggttcggcctactttctagcctcactcagcccagggatagccagtgttgggagacagagttgcctcaggttcccaggggcccgggagtccaaatactggaatggagggttggaggcagccttccttggatttactcatgaactttgcctagttgtttgtgatttttggctttctctggtcgttcaggggtgatgggtaatagagcaggcccgtgtccagtcatacctagagatttgtggggggatactgaacctctagactgaagtacttaccggggagcacagtggactaggggatgcccttgataatgacggtttcctaggtgcaagatcagagcatgtgcctacaccttgtgccctgatgccgaggtggagaccattgggaaataattaatagatatttttctggggggaaatcacaagtcactgaggtgtttgtttgtttgttaggcagtgctagagcttgaagccactcaagccagttggggaggaaagggatgcggaggtaccctctagctgggaagaagggtgagattccgtcttcttccctgtctcaagtaagtaaggaaggtactgcggacagtgtgggccagggaggaaaaccagagcacacagttttgtcaccatggaacaccccaaatgccattcttcagcgtgtctggtaccttggatgttcaaacagggaacactgtcagggctgaggagaacagaagctctggtaagcgaatgagcccctagatgataaccaggaactccaggttctgctggccgtggcatcctctctccaggtctgctcccttaccggagctaggataaggtagcatgagtgacacctgagattagaggctggggctcactgcaggctgtggagaggtcatgctggtccacaggaacacttggcagtgctctcgtagacccctcggtgatgtggaatggacaggtgcctcgcaagagagcaagcacgttcataacaaaacagcaacacaaagacatgttaagcatgtttatttatttgcctgtttttgtttttttacttgagctgtggtcacagctgccaggtacctaagcaagtcagttgggtacagcaggacacgccaccattccagggtagctggtaccgccagaaacaggagtgggtcttgtcctgttgcaggcacactgcagtggttttcctgcagctctccaacaaacgcctgagtcacaggccagagctgccttggtatgttgttaagtccaaaacttcttctctgggctacctatcttccttcatgaagcaggtgctcaggacccggaagaatcatctacctcccagctttgtgagacagaaccaagtaaaaggaaacatgctagaaaacgtgcctagagaagacacttcaacctttgccttatccaacccctcttcagagaaaggtgtcccatggccccaaaaagaactgccaagttttggtgaggagtaacaccctggcatgacattccttctctttcctggccctcaaccacttccttcctttggctcttaagacctagcaggttctgtgaactctcaggccttggccagcactagttaggggaggtcaggtggtcaatgtcctggtgattttatgagactgccccactgagaaaacttacttacttcaggcatccagtgcccccacccagggttcaggccctgtctaaggtgttgcttaaagacaaaaaggcaacatgtgcctcactggtggtgtgccactgttctcatgctgcctcctaagtgactccgattttcagccctggtagaataaggaagacagctgatgcctccttagccccttagcacatgttcctaaggtgtgttgtcaagccaacctgaattctgcctccctgttatagtccctgtctcccccacagagacctgtgggtgctcccagcagagttgagactggctccgttgagttaatgactagaatatagtgctttcactacttgattgttaacctgttttcttctgatgccatcagtaccagcagtcagactattccactggttaagtgtttactaccattaaagcgaggcatgaagcaaagagctgagtgagtcctctgctctccagaggaccaagaaatacctgtgtgacacagacccacttcagtgtgtacagcaaattctatagtgcttctgagcccagcagggctttacctgcccctggagagttttagccgtcttgtgtttcttgtttacttcacaaccaaatttgtcccctcttctctctgttaagggagagaagtcactttagctggataatacctatgtaacaaactgagcagctgttatttgggcaaaatcaaaggaagaaagagactatggtcttctatttattgtgggaaggaaaacagggtggggcgggtgagtgaaaaggtggaaatccctggtaccttgcctggtggttacacagtttaaccataggccaattttaggggcctctgaagtatctttctacaaacgcagacaagctccactacccctaacctgccaggatgctcaagtccactgtcacaatccctttcagaaaacattagtggccgctgccccagctacagagacggccgaaatgctttcactccttagctttgccaactccatcctccaaaacttcccagaatacctccctttccagttctaccaaatctgtacttgggagcagcctgctggatccagaacatgacaacagagagctgcgtccacagggaacaaagccctgacctctctctccacattacccttacaaaaacaggccctccccatgagagagctacacggcaggggcagacactgtgagtataagctactttcctccctggagtgctctatgtgggcagaacatgctctccttgcctctcctggaaggtgtcttctctatggcctggctagagctgcaaaaaagggacacaccccacttcggtaaaagaaaatagggaaaggccataaacaaagacagacttgtagtttattttgtattttttttaaataaatacactttacattaaagaaaaaaaaaaaaaa

SEQ ID NO: 2208 - DNA, 8750 bp, Homo sapiens
gggaaggtggcggcggcggcggcggttgtcccggctgtgccggttggtgtggcccgtcagcccgcgtaccacagcgcccgggccgcgtcgagcccagtacagccaagccgctgcggccgggtccggcgcgggcggcgcgcgcagacggagggcggcggccgcggccagggcggcccgtgggaccgcgggcccccggcgcagcgctgcccggctcccggccctgccggcctcctcccttggcgccgcggccatggcggccagcgcgaagcggaagcaggaggagaagcacctgaagatgctgcgggacatgaccggcctcccgcacaaccgaaagtgcttcgactgcgaccagcgcggccccacctacgttaacatgacggtcggctccttcgtgtgtacctcctgctccggcagcctgcgaggattaaatccaccacacagggtgaaatctatctccatgacaacattcacacaacaggaaattgaattcttacaaaaacatggaaatgaagtctgtaaacagatttggctaggattatttgatgatagatcttcagcaattccagacttcagggatccacaaaaagtgaaagagtttctacaagaaaagtatgaaaagaaaagatggtatgtcccgccagaacaagccaaagtcgtggcatcagttcatgcatctatttcagggtcctctgccagtagcacaagcagcacacctgaggtcaaaccactgaaatctcttttaggggattctgcaccaacactgcacttaaataagggcacacctagtcagtccccagttgtaggtcgttctcaagggcagcagcaggagaagaagcaatttgaccttttaagtgatctcggctcagacatctttgctgctccagctcctcagtcaacagctacagccaattttgctaactttgcacatttcaacagtcatgcagctcagaattctgcaaatgcagattttgcaaactttgatgcatttggacagtctagtggttcgagtaattttggaggtttccccacagcaagtcactctccttttcagccccaaactacagcatttagaatgctttcatctagctgcagttttggtgaatttacttcagcttttcctcttcaggctacccacagtggaagtgctgcatcagtaaatgctaattttgctcattttgataacttccccaaatcctccagtgctgattttggaaccttcaatacttcccagagtcatcaaacagcatcagctgttagtaaagtttcaacgaacaaagctggtttacagactgcagacaaatatgcagcacttgctaatttagacaatatcttcagtgccgggcaaggtggtgatcagggaagtggctttgggaccacaggtaaagctcctgttggttctgtggtttcagttcccagtcagtcaagtgcatcttcagacaagtatgcagctctggcagaactagacagcgttttcagttctgcagccacctccagtaatgcgtatacttccacaagtaatgctagcagcaatgtttttggaacagtgccagtggttgcttctgcacagacacagcctgcttcatcaagtgtgcctgctccatttggagctacgccttccacaaatccatttgttgctgctgctggtccttctgtggcatcttctacaaacccatttcagaccaatgccagaggagcaacagcggcaacctttggcactgcatccatgagcatgcccacaggattcggcactcctgctccctacagtcttcccaccagctttagtggcagctttcagcagcctgcctttccagcccaagcagctttccctcaacagacagctttttctcaacagcccaatggttttgcagcatttggacaaacaaagccagtagtaaccccttttggtcaagttgcagctgctggagtatctagtaatccttttatgactggtgcaccaacaggacaatttccaacaggaagctcatcaaccaatcctttcttatagccttatatagacaatttactggaacgaacttttatgtggtcacattacatctctccacctcttgcactgttgtcttgtttcactgatcttagctttaaacacaagagaagtctttaaaaagcctgcattgtgtattaaacaccaggtaatatgtgcaaaaccgagggctccagtaacaccttctaacctgtgaattggcagaaaagggtagcggtatcatgtatattaaaattggctaatattaagttattgcagataccacattcattatgctgcagtactgtacatatttttcttagaaattagctatttgtgcatatcagtatttgtaactttaacacattgttatgtgagaaatgttactggggaaatagatcagccacttttaaggtgctgtcatatatcttggaatgaatgacctaaaatcattttaaccattgctactggaaagtaacagagtcaaaattggaaggttttattcattcttgaatttttcctttctaaagagctcttctatttatacatgcctaaattcttttaaaatgtagagggatacctgtctgcataataaagctgatcatgttttgctacagtttgcaggtgaaaaaaaataaatattataaaatatgctattgtttttgtgttcttgctgcaatgcctttaccaaagtggccttaaatatgagtagtgaattgagaacatcttgaattcttaaaagacttcttagtgactttttataaaaaggccatgtagaaaatttattaaaactactatgactgctacattcaggaatatgccagtggtaaagcatttaaatgtagcttgtcagatttaccataatcctactaatttctttgcagcttattaattttgtgaaatttgtatatatgaagaatttgcatgtatgtgtatttacaaatttttctaagtatcttgaattctcagactgcaaaaggcctattttaactattgattttttttaaaaaaaattgtctttgaatgtattggaagtagacatgcattaactgtgacattattgcacctcagtttttttctttctttttttgggcaaactgatattatctataggatatttgtttatgtttgttttttgggggaaagaaactggaactcagtgttaccttaaagttacggaatactttgttttaaaggaaaagataataagtttagttatatctttttgttaatattcaaatgaacttgtttaagtatctatgtacagtaatgcctcattcatctagaggtaatctggcagtcttgtgaaaaccgaacacaactcagaaacttggaatcgttttttttaaaaatgcctctgagcaacccatataagtcacaaagtctgtgtgttagagcttatgcatttgtttttatgagagattttaataaatttaattatttgcttgtccagactatagcatattagctgtttagaagggatggcttgaaaggaaggagactgaaaaacactctgagagcatacactgtccaaggccattagtgtaaggaccgctacccagcctagaggacatcactatactacatcatctgatgattattctttattatgcctctaggtaattaagtaaaggtgaaattgcatacacagatatgtagtacatattttaaaagttttatcttaaattgattaaaactttttaaaaagctttggtattaaaagaggtaaacatcagtttcctcaaacattttattcatgttgaatgcctttttgcaatgatgactgagttgttatcatagtattttaaaacctgtatagtgttttagacttgttaaaacattgctgtctagtgtacatctagctaaaagtgtggtttatctaaaccgttttaataagcaagatgactgggaaatctctgccccttttctgagcagtatgcctcttcttttagaattaaatgaatgctgcacaggtccagatgtgtgttgatgtagacttgaaatgtctccacattttggaggacttcctcagcccttttcattgagggaaaatatatttgaatttctgttttagattgtatcgggtcccagttgattcatgtgtacaaagttatgctacctaattacagaccattacccaaatatcctaccaggctttccatctgaatagtaaattaaacagttgttatcaaaatgattttaaagactatttctttttctgggtaactattgaagtttgtaattaaatgggggctcttactgactttaaattagcgcttataaaataaaaatgtttagttcaagaagagacccaagctgggtatggtggtgtgagagcctgtgagtcctagctacctggaggtgaggtgggaacatcacttgagcccaggagttggaggctgcagtgcgctacgatcacaccactgcacaccagcctggggatagagtgagatcccatctctaaaaaatgaaaaaaagaagagaggtagctttaaagtggtttttctcatgatattcactgtttattattaaagaaaatcagctttcgttagacttttacatttagatttattctagttttatatagaccatcaaaattatgttgagtactaaaaaggagaaaaaatcctggaaggtaacaaggctgaagaccttcaaatttcctggcttactggtttagtcacatcatttttcctgttcaggtatctgcagatatccctgttcaggaaagatcttttttcaggatggcaaacttttgacatagtttaaagacattttttccccattttttgaaatagagaatattttattatttttgtgaaaatagagttttggtaatcactttcttcctcaaaataagtccttctgttaatttgtaaaagcacattagtgctttacctgtgaaattccccgcccccctgcacacacacccactttagtacagttcctgtcaattggcaacatggagagggtgacctggctgctggtttaccactgtaccaacatctctggagcattttagtttcagaaccttaacactccccaacagctttgttgatgtagcttgtatctctgagaatttattgtattaaaattaatactgagatatttttaaaacatgtttatttatttaagtataacagtaataaactaataacttgctaacataaataccatttttgataaaaataacttttccaaaacaaaaactaatgagaacaggaacattgttttacattttatgcatttaaatctggcttaataaaagcagtgagattttcatgctgcttttgcattccaacttaaaaattacacagcatacacacgctggaaaactccactgtgcacttgtgagatcaggagaatgaaaactatgtaatatctcagtagtacaatgaaaatagtttgacttttcacagcctttcaaagaaagggttgtagggaccattaagggtctccagactctttgagaaccactatactttaaatttgtgtatttctagaacagtatttacttgcagggcaaacataactattccctgggttttttttgtttgctagtgagaactgaaattgcagactttttaacactacttcaaggtaataatagcagtggtattatgggctgtgtatgagatagtcatttgtaaaacaattttcatatttcatctcttacaatccctgcagtggacctatacttttaggatgaaagaagcaaagcatagagaggttaagctagtggcagctttttgctctggggaacagatttggattaaatgctatcacatttatatatgaatgcattctttcttaatattttgaaattctgaacaagttaacgttcttgtcttgtatatctaaaaaaactttaatcacttgaattcctttcataatttgatgaaatcagtacagtttattcttggtttttttttttaactttagaagtaaattaatatggtaactagtggagcgtgctttagattgaagactcatctgaagtatcacagactcctattttgtaaagcattccacctttattgatacagtttgtggcctatacacttttaaaatttattttttaaaaggtgatattaaaatttgtatttaacctgttgtattcatcctcattagttaagtttttctttttatgttttaaaacttagtgacattaaacttttcacgtggttgtttgtgaacagatgaatatataaccacgatgtaatccagtgttgtgctgctgaatgtttaacaaccatctttcatgaaagaaaaaaggccctgttttgtagcatttactaatatttatggtataaatactgtcttcatggtgattttacctgccaatctgatgtcattaaatgcagtttgatgaaagagatagccaaccagtggctttcccaagccttggcaaaccagcttcagcacagcaaaggacatacaattccacaactcattaattaaatgtattggtcatttgatgattatatccagtatttggagagcttttatattgttaattcatttagcaagcatttgaacacttgtttatttttagagatatactgggcactgaggtatttaatctgcaaagacccaagtatcgtgaaccttggttttaaaaagtccaattattgtgctcttataggggttgcacattcaaggcttacactgaattctgtctgcagttctgttttgtgtgaccagcacagtgttttaaaacgttgcattctgaatccatctttttgaaatggggcatgtactcttaaggtggccactagcttaccattcccaatttttcttagtctcaaacattcacatgtttttcaaggccttggagttggcaaatcctgaatatatagtgaaggtaggaaatagctcttcttatgccacatcttagtctgattttgaagtcagttgtgtaagtttgggctgacagtggtattttccagtgaagactatcgccaagaatgcatatcattctgcttattttattctagtggataaaaattcaacgtatatttaagtgtatttttgacatctgtgcttgtccaacacagggctgtagggactgatgaaaagagaatgttgtgatttgagcttttataaaaaaagataagtgatcctagataaaatattttagatggtgattaaaatgcccatagattaattttttaatcggttctctgaaatcttgagatgttatccaagttacaatttaagcaatgagagtaaaatttgaattctaaattctcagcatcttccctcattcttgagtggagagacagaggaagcaaacgccaaggagccttctaattttgactatatgatcattaactaaaggcagcaagggattgtaaactaatcttacatagtcaatgtttcatagaatgctttggttacaatcaggttttttaaagactttaaaggttttttgtatgctataatatatgcttatgatttctaaaaattatgcagtatacacaaagggcataaagtcaaaaagtgtgtctccctctgtgactttattctcataccccagaggcatataatttcttgtattcttgtgtagtctttaagaaatgttatcgtttattttatatatggctctctctctgtatgcctcttcctgttcttattttaaatgttcaagtttgtgacttggttcttgtttaacttggttgtctttccatattgccaccttccagctctaacattaatgtctccaggattccattatatggatgtccctttgggagaacatttgtttatagacttttctactaaaaatattgttataatgataatatccttatgcatatatgaagattactcttgattctgcctgactggaaactttattaataaagtagacattattctattttgaggctcaccagctgtgtaggtatgatcttgtgcttccatttaagaaattcttccatttaaagaagaaaaaaaatctctctgactatctgaagatatatgaaaaagcctatgcttttaaattaaactgttaagacagtccattgaaagattgtggaagttcacatctattttgcaccttaattttttcattgtccctactcatgactctaaaaagtgcatggcttggggctatactttgttttgcagtttgttggtatcgtgcctttccttatctacattagcttagactataccttatttttaagaagagaaagtggaaattaactgtggcaaaacctattttggcacaaccacatttgttcattatacaaaattagcttcctatgctttagaaaaaatgtgagttattactctgaaagttgtgattctgattcctcatggtttggagctcagaaatttcttaacatgtctttgctgttagtcaagcacaggatttgttttctgcaaaagtttattttcaatgaagaatacttgtcctaatagctcataaaaagtacctttgcactttaaatcctaggaatagggaacaaggaaacttactgggaagttcaaaagaaagaataacaggaccttctagtcagcagggcatgtttggaaaatgttaatacgccatgatttttgaagaccaattttagttcaggaggtggttttaaatattggatgaaaacttacaggctgttttcaatattcatttctgaaatactttagtatgatagataaatttggttaagttcttgttcattgtgaaatactgttggaagaatttttttcaaaataaagacttctgaatttgtgtaccatttggaaaaaaaaaaaaaaaaaa

SEQ ID NO: 2209 - DNA, 2357 bp, Homo sapiens
ggccagctggctatcagacaatgacatgctttgacaggcccctgagctctgtgagtaaattcttgaacagctgagagtgctaccattttgtcatagccctaagggtgcagatgatgctgaaagcgtgttggccaaatctgaatgatgaaagccaattacaaactagaaaatgaaaacagaccccagatgcaaggagatgagacagttaaatttacttcctcttttctaatctgagaggtttcatgttgaagaaaatcagtgttggggttgcaggagacctaaacacagtcaccatgaagctgggctgtgtcctcatggcctgggccctctacctttcccttggtgtgctctgggtggcccagatgctactggctgccagttttgagacgctgcagtgtgagggacctgtctgcactgaggagagcagctgccacacggaggatgacttgactgatgcaagggaagctggcttccaggtcaaggcctacactttcagtgaacccttccacctgattgtgtcctatgactggctgatcctccaaggtccagccaagccagtttttgaaggggacctgctggttctgcgctgccaggcctggcaagactggccactgactcaggtgaccttctaccgagatggctcagctctgggtccccccgggcctaacagggaattctccatcaccgtggtacaaaaggcagacagcgggcactaccactgcagtggcatcttccagagccctggtcctgggatcccagaaacagcatctgttgtggctatcacagtccaagaactgtttccagcgccaattctcagagctgtaccctcagctgaaccccaagcaggaagccccatgaccctgagttgtcagacaaagttgcccctgcagaggtcagctgcccgcctcctcttctccttctacaaggatggaaggatagtgcaaagcagggggctctcctcagaattccagatccccacagcttcagaagatcactccgggtcatactggtgtgaggcagccactgaggacaaccaagtttggaaacagagcccccagctagagatcagagtgcagggtgcttccagctctgctgcacctcccacattgaatccagctcctcagaaatcagctgctccaggaactgctcctgaggaggcccctgggcctctgcctccgccgccaaccccatcttctgaggatccaggcttttcttctcctctggggatgccagatcctcatctgtatcaccagatgggccttcttctcaaacacatgcaggatgtgagagtcctcctcggtcacctgctcatggagttgagggaattatctggccaccggaagcctgggaccacaaaggctactgctgaatagaagtaaacagttcatccatgatctcacttaaccaccccaataaatctgattctttattttctcttcctgtcctgcacatatgcataagtacttttacaagttgtcccagtgttttgttagaataatgtagttaggtgagtgtaaataaatttatataaagtgagaattagagtttagctataattgtgtattctctcttaacacaacagaattctgctgtctagatcaggaatttctatctgttatatcgaccagaatgttgtgatttaaagagaactaatggaagtggattgaatacagcagtctcaactgggggcaattttgccccccagaggacattgggcaatgtttggagacattttggtcattatacttggggggttgggggatggtgggatgtgtgtgctactggcatccagtaaatagaagccaggggtgccgctaaacatcctataatgcacagggcagtaccccacaacgaaaaataatctggcccaaaatgtcagttgtactgagtttgagaaaccccagcctaatgaaaccctaggtgttgggctctggaatgggactttgtcccttctaattattatctctttccagcctcattcagctattcttactgacataccagtctttagctggtgctatggtctgttctttagttctagtttgtatcccctcaaaagccattatgttgaaatcctaatccccaaggtgatggcattaagaagtgggcctttgggaagtgattagatcaggagtgcagagccctcatgattaggattagtgcccttatttaaaaaggccccagagagctaactcacccttccaccatatgaggacgtggcaagaagatgacatgtatgagaaccaaaaaacagctgtcgccaaacaccgactctgtcgttgccttgatcttgaacttccagcctccagaactatgagaaataaaattctgttgtttgtaagctaaaaaaaaaaaaa

SEQ ID NO: 2210 - DNA, 6099 bp, Homo sapiens; identical to SEQ ID NO: 492

SEQ ID NO: 2211 - DNA, 4095 bp, Homo sapiens
gtgtgtgagagtccagccttgggccagagtgccgggtctaggcctggaagcgcgaggcgggcatttcggaagagagtggcgcggcgtggggcgccgcgagggcactacgagcccaggaactgccgcgccggcccgattttccgcggctgtataaggactagcgcttcggtagccggggagctggagggaacctgatttgagatcaattcttggagaacacaaagaagtgtgatggattgaaccagctgccctttgaccctgctaacaacaacgagcccctgcagtttggtagtgccagtggccctctggtcacagaaggcctcattgagaatggaggggaatcaagcaagaaaagaaagagaacaaatactccttcagccgataacagtagaactctgaacgtggattccactgcaatgacactacctatgtctgatccaactgcatgggccacagcaatgaataatcttggaatggcaccgctgggaattgccggacaaccaattttacctgactttgatcctgctcttggaatgatgactggaattccaccaataactccaatgatgcctggtttgggaatagtacctccaccaattcctccagatatgccagtagtaaaagagatcatacactgtaaaagctgcacgctcttccctccaaatccaaatctcccacctcctgcaacccgagaaagaccaccaggatgcaaaacagtatttgtgggtggtctgcctgaaaatgggacagagcaaatcattgtggaagttttcgagcagtgtggagagatcattgccattcgcaagagcaagaagaacttctgccacattcgctttgctgaggagtacatggtggacaaagccctgtatctgtctggttaccgcattcgcctgggctctagtactgacaagaaggacacaggcagactccacgttgatttcgcacaggctcgagatgacctgtatgagtgggagtgtaaacagcgtatgctagccagagaggagcgccatcgtagaagaatggaagaagaaagattgcgtccaccatctccacccccagtggtccactattcagatcatgaatgcagcattgttgctgaaaaattaaaagatgattccaaattctcagaagctgtacagaccttgcttacctggatagagcgaggagaggtcaaccgtcgtagcgccaataacttctactccatgatccagtcggccaacagccatgtccgccgcctggtgaacgagaaagctgcccatgagaaagatatggaagaagcaaaggagaagttcaagcaggccctttctggaattctcattcaatttgagcagatagtggctgtgtaccattccgcctccaagcagaaggcatgggaccacttcacaaaagcccagcggaagaacatcagcgtgtggtgcaaacaagctgaggaaattcgcaacattcataatgatgaattaatgggaatcaggcgagaagaagaaatggaaatgtctgatgatgaaatagaagaaatgacagaaacaaaagaaactgaggaatcagccttagtatcacaggcagaagctctgaaggaagaaaatgacagcctccgttggcagctcgatgcctaccggaatgaagtagaactgctcaagcaagaacaaggcaaagtccacagagaagatgaccctaacaaagaacagcagctgaaactcctgcaacaagccctgcaaggaatgcaacagcatctactcaaagtccaagaggaatacaaaaagaaagaagctgaacttgaaaaactcaaagatgacaagttacaggtggaaaaaatgttggaaaatcttaaagaaaaggaaagctgtgcttctaggctgtgtgcctcaaaccaggatagcgaataccctcttgagaagaccatgaacagcagtcctatcaaatctgaacgtgaagcactgctagtggggattatctccacattccttcatgttcacccatttggagcaagcattgaatacatctgttcctacttgcaccgtcttgataataagatctgcaccagcgatgtggagtgtctcatgggtagactccagcataccttcaagcaggaaatgactggagttggagccagcctggaaaagagatggaaattctgtggcttcgagggcttgaagctgacctaaatctctttgcctaacaacttgggatcctgaagataaatatgtgttggacaagcatagaaagtgatttatatttttaatggttttcaagtggaagttcctttgaatttgtcagttcattcctggaaaatcttttgagttaaaataaggatcctaggacagcacctcgaactacaggccctaaagagaaattgcctcaaaccacaagtgctgtaacttcctcccctttctgtcaattggttgtctttaaatattgcaaaagtcctgatgctaaacagtatttggagtgttttcagtgtctgtactactgttgtagaccttggtatttttttaaacactgttaactgaaatgttttgatgatttgtatgtgatttgtgtttctaaacttctctttacattaatgttgttactggtgaaaggcatgagagcagcactaagtcctctgtgtaactgccattgtctttccaatccccagtagaccagtaaataaataacacatcagtgtcttctagaaggtgcctgaccaggttcaccttttaaacgacaaagcatggtttgtggctttttgcaaaattactatgaaccaaaagttgacaaatgttccaaagttattttctctaacatatcacattaaagatctgtttcagaattgtaaaaagtacatctagatgtgtttacagaaagcaagtatccagtatgactggcatgtgttcatgctattcagaatcacttgtaaatagtctgcttttaaaggagggcatgttcagttttctgtgaattaaaatatgctcatgtgtgggcacacacgcacaaacacacacacgcacgcacacagtggcagaagggatttatattaatattctttcccctctggccttcttacagtctgttggtccctttgcttctgttgtcagtgtgttgaattgcaaaccgagtactgctgtaaatactatgtttacttcatgctgaatgtttgcaaagacttgatataagtattaatagtaatgaatcaatgaataaataatgagctagggtttgtgaggctttctacaaataggtcagctccacctggagtgcgaattgccagagacaccttggtagtgcccatcggcaaatcgcaatggcagcatgtgagtggaccattcagaaacttctgcttggtggaaagtaaacagagaggatggaggtttggggcgaatgtcctgaggcagagatggtctttattgtgtgtggtggtggttgtggtatttataataatgcaagcataccctcccttgagtctcaattgaagataaaagaatgtactgagcaagcaaagccaatggagagtatttcacaaaaatactttgtaaatgagatgccagtagtgttcaaagttgtatttttaaaagataaatattcctttttatacctcagttttgtgtcctgtttttaatgacttacgctctaagtaatccattagtagttatctcagttccttcctttgggttactagaatgttggaaaaagatgccaagtctgtcttgacaactggaaacagggttccacagcagcccattcgtgctgaaaactggcttccccctgaagcaccctgctgtggcaccagcaggaagctcaggttaattttacactagcttgctcactgatgcatctctcatcaatgctacggaaggctttgattcatcagtctcgggctcttggaatacctaattttaataatatctatgaaatcaagggaaactttccatttacagttatttcttgtttaaataaactaaattaatttttaggggagagcagtaggaaaaagagctaatgcatgcggggtttaatacctaggtgatgggttgaggtgcagcaaaaccaccatggcacacgttcacctatgtaacaaacctgcacatcctgcacatgtaccccggaacttacttaaaa

SEQ ID NO: 2212 - DNA, 6416 bp, Homo sapiens
gggtatcctggtctccgcgtgtgtgagtaccgcggcgcgaggttagtggtagctgggtgcagacgccgtggcgctggagacccaaacatggcaaacctggaagaaagcttcccccgaggaggtacaagaaagatccacaaaccagagaaagctttccagcagtcagttgaacaagacaacttatttgatatttctactgaagagggatccaccaaaagaaaaaagagccagaaggggccagcaaaaacaaaaaagttgaaaatcgaaaagagagaaagcagcaagtccgcaagagagaagtttgaaatccttagtgttgagtccctgtgtgagggaatgcgtattttgggttgcgtgaaagaggtgaatgaactggaactggtgattagtctccccaatggcctccagggctttgtgcaagtcactgaaatctgtgatgcctacaccaaaaagctgaatgagcaggtgacacaagaacaacctctgaaggacctacttcacttgcctgaacttttctcacctggaatgctggtaagatgtgtggtgagcagtctgggcatcacagacaggggcaagaagagtgtcaagctgtctctgaaccccaaaaatgtcaacagagtgctgagtgctgaggccctgaagcctggcatgctacttacaggtaccgtatccagcctggaagaccatggctacctagtggacattggtgttgatgggaccagagcttttctgccactgctgaaagcccaggagtacatcagacagaagaacaaaggtgctaaactaaaggtgggtcagtacctgaactgcattgttgaaaaggtgaaaggcaacggaggagttgttagtctgtctgttggtcactcagaggtttctacggccattgctactgaacagcagagctggaaccttaataacttgctaccaggactggtggtcaaagctcaggtacagaaggtgactccatttggccttacgctaaacttcctcacattcttcacgggcgtggttgactttatgcacctggatcccaagaaagctggaacatatttctcaaatcaggcagtgagggcctgcatcctttgcgtccatcctcgaaccagagttgtgcacctgagcctgcgccccatcttcctacagcctggacgcccactcacccgactctcttgccagaaccttggagcagtgctggatgatgttcctgtccagggttttttcaaaaaggctggggccacctttaggctgaaggatggggttctggcctatgcccggctcagccatctctctgattctaagaacgtcttcaatcctgaggccttcaagccagggaacactcacaagtgtagaattattgactacagccaaatggatgaactggccttgctctctctacgaacgtctattattgaagctcagtaccttagatatcatgacatcgaacctggggcagtggtaaagggcacagtgctaaccataaagtcatatgggatgctggtgaaggtgggcgagcagatgaggggcctggtacctcccatgcacctggctgacatcctgatgaagaatccggagaagaagtaccacatcggggatgaggtcaagtgccgggttttgctttgtgaccctgaagccaagaagctgatgatgaccctgaaaaaaaccctgattgagtccaaactacctgtcattacctgctatgccgatgccaagcctggtctgcagacacatggcttcatcatcagggtcaaggactatggctgcattgtgaagttctacaacaatgtgcagggactggtgcccaagcatgagctcagtactgagtatatccctgacccggagagagttttttacactggccaggtggtgaaggttgtcgtattgaactgtgagccatccaaagagaggatgctcttatccttcaagctgtcgagtgatccagagccaaagaaagagcctgcaggacacagtcagaagaaaggaaaagccattaacattgggcagttggtagatgtgaaggttttagagaagaccaaagatgggctggaggtggctgtcctgccccacaacatccgtgctttcctccccacatctcatctgtcggaccacgttgccaacggcccattgttacatcattggctccaggcaggtgacatccttcaccgagtcctgtgtctgagccagagcgaggggcgtgttcttctttgcaggaagccagccttggtctccacagtagaaggtggccaggatcccaagaacttctcagaaatccatcctggaatgctgctcattggttttgtgaagagcatcaaggactatggcgtgttcatccagttcccctcaggtcttagcggactggccccaaaagctatcatgagtgacaaatttgtgacctccacaagtgaccactttgttgagggccagacagtagcggcaaaggtgaccaatgtggatgaggagaagcagcggatgctgctgtcactgcggctgtcggactgtggtctgggggacttggctatcaccagcctcctcctcctgaatcagtgcctggaggagctgcagggcgtgcgcagccttatgagcaaccgagactctgtgttgatccagacgctggccgagatgaccccaggaatgttccttgacctagtggtgcaggaggtgttggaagatggctctgtggtattcagtgggggtccagtgcccgacctggtcctgaaagccagcagataccatcgcgcagggcaggaggtggaatctgggcagaaaaagaaggttgttatcttaaatgttgatcttttgaagttggaagtgcacgtttcccttcaccaggacttggtgaatagaaaagctagaaagctgaggaaaggcagcgaacaccaggcgattgtgcagcacttggagaagtcctttgccattgcctccttggtagagacgggccacctggcagctttctccctgacctctcacctcaacgacaccttccgctttgactcagagaaattgcaggtgggacagggtgtctccctaaccctcaagaccacagaaccaggagtgactggccttcttttggctgtggaggggccggctgccaagaggaccatgaggccgacccagaaggactctgagacagttgatgaggatgaagaagtggatccagctctgactgtagggaccataaagaagcacaccctctccatcggggacatggtcacagggactgtcaagtccattaagcctacccatgtggttgtgactctggaagatggcattattggctgtatccatgcctcccacattctagatgatgttccagagggcacctctcctactaccaagctgaaggttgggaagacggtcactgcccgagtgattggcgggcgagacatgaagacattcaagtatctcccaataagtcaccccagattcgttcgaaccatcccggagctgagtgttcggccaagtgagctggaggatggccacactgctcttaacactcactctgttagccccatggagaagattaaacagtaccaggccggccagactgttacttgcttcttaaagaaatacaatgtggtgaagaaatggcttgaggtggagattgccccagacatccgggggagaattcccttattgctcacttctctgagcttcaaggttctgaagcatccagataagaagttccgggttggccaggccctgagggccaccgttgttggcccagattcctccaagaccctcttatgtctgtccctcacaggtcctcacaagcttgaggaaggggaagtggccatgggccgagtggtgaaggtgactcccaacgaggggctgaccgtctccttcccctttgggaagataggaacagtcagtatatttcacatgagtgactcctactccgagacgcccctggaagacttcgtcccccagaaggttgtcagatgttacatcctgtccactgcagacaacgtattgactttgtcgctgcgatcatccagaacaaacccggagacgaaaagcaaagtagaagatccagagattaactccatccaggacattaaggaagggcagcttctgaggggctatgtagggtccatccagccacacggtgtgttctttcgccttggcccctccgttgtgggtttggctcggtactcccatgtctcccagcacagcccgtccaagaaagccctttataacaaacacctccctgaagggaagctgctcacagccagggtcctacgccttaaccaccagaagaacctggtagagctgtctttcctccccggagacactgggaagccagacgtgctttctgcttccttggaagggcaacttacaaagcaagaggagaggaaaacagaggctgaggagagagaccaaaaaggggaaaagaaaaatcagaaaaggaacgagaagaagaaccagaaggggcaggaggaggtggagatgcccagcaaggagaagcaacagccccagaagccacaggcgcagaagcggggcgggcgggagtgccgggagtctgggagtgagcaggaaagagtgagcaagaagccaaagaaagccggcctgtcagaggaggacgacagccttgtggacgtgtactatcgggagggaaaagaggaggcagaagagacgaatgtgctgcccaaggagaagcaaaccaagccagcagaagcgccccggctgcagctgtcttcaggcttcgcttggaatgtgggactagactctctgaccccggccttgccacctctagcagagagctcagacagcgaggaggatgagaagccacaccaagccacgataaagaaaagcaagaaagaaagggagttggagaagcagaaggcagagaaggaactgtcccgcattgaggaggcgctgatggatcctgggcggcagccagagtccgcggatgattttgaccgactggtgctgagctcccccaacagctccattctgtggctgcagtacatggctttccacctgcaggccacggagatcgagaaggcccgtgccgtggctgagagggcccttaagaccatctccttcagagaggagcaggagaagctgaacgtgtgggtggctctgctgaacctggagaacatgtacggctctcaggagtccctgaccaaggtctttgagcgagccgtgcagtacaacgagcctctcaaagtctttctccacctggctgacatctacgccaagtcagagaaattccaggaagctggtgaactctacaaccggatgctgaagcgtttccggcaggagaaagctgtgtggatcaaatacggcgccttccttctgcggaggagccaggctgcagccagtcaccgcgtgctgcagcgagccctggagtgcctgcctagcaaggagcatgtggatgtcattgccaagtttgcccagcttgagtttcagctgggggatgcagagcgggccaaagccatttttgagaacacgctgagcacctacccaaagcgcacagatgtctggtcggtctatatcgacatgaccatcaagcacggcagccagaaggacgtccgggacatctttgagcgggtcattcatctgagcttggcccccaagagaatgaagttcttcttcaagcgctacctggactacgagaagcagcatggcactgagaaggatgtgcaggcagtcaaggccaaggccctggagtatgtggaggccaagagctcagtgctagaggactagtggcaggctggctctgtgggacactgtcaacaatgggccagcccggccccgcctcgagtgcctgggcactcggaaaactgttacctcaggactctatttaaatgctgctttttctgcagcacgcttggggaaatcctgtcaggatgaaaaggaagttgagattttttaaatccctcttcgcttgctttattttcagtaccaacttgttatctttttccttatctgaggctacctggggattgtgggcagcaggcccctggactcccagaaatgctgagggtccctcttccaggggagttccctggggagcaagagtagaggggctattcccgagggtcctgtggtcagggtcctgctttgtccctggcaggctgtcagtccagctggagggggtcagtaggctccagggagtgggccctcccctccgatcttggagtctctgggtgttccttcagcctcagcctcactggtaccttctgccctttaggggaggctatgagtctgggacaggaggacaaattcagagcccagagggggaaatggagaaacctgggctgctgaggaaagccacgggtgttggcgtgaactgatgatgtctcatcccacgcccactatggccacattacctaacctctccatatctgggctattcaaggtcttggaggccagcacagacccagctagttgttgaagccagttcttttttgtcttgg

SEQ ID NO: 2213 - DNA, 436 bp, Homo sapiens
gtccttaggggatggtaaatttgacagggctgtaagtgagcacttgttgtctgctgaacactgggtggtcaagagacccactgagattggttagttggaacagaacatgaagagtggataccttaatctgcttgggctgctataacaaaataccatagactgggtggcttaaacaatggaagtttatttctcatagtactgaaagctgcgaagtccaaaatcaatgtactggcagattaagttcttggtgaggaccctcttcctggctcgtaaatggctgacttctcactgtatccttacatgacagggagagaaacagctcaggtgtttcctcttccaagggcactaatcccattgtgtgggctccaccctcatgacctcaactaaacctagttactgcccccacccacctcctaatgtaattatagtaagagtc

SEQ ID NO: 2214 - DNA, 4821 bp, Homo sapiens
gcgaagtctcctgcggatgccgcccgctcccgagcttctgtcaggggagccgggcgtgcggaggcggctgaggaggcgggaaggcggcagtggttgaaggggtgattgctgactagcggggagggagtgggcagcgatggtgatggcggcgaagaagggcccgggcccgggcggcggggtcagcgggggcaaggcggaggcggaggcggcctcggaggtgtggtgccgtcgggtgcgggagctgggtggctgcagccaggccgggaaccgccactgcttcgagtgcgcccagcgcggggtcacctacgtggatatcaccgtgggcagcttcgtgtgcaccacctgctccggcctcctgagagggctgaacccccctcatcgtgtcaagtcaatctccatgacaactttcactgagcctgaagtagtattcctgcaatcccgtggaaatgaggtttgccggaagatttggttgggtctgtttgatgctcggacatctttagtaccagattccagggatcctcagaaagtgaaggagtttctccaggaaaaatatgagaagaagagatggtatgtccccccagaccaagtcaaggggcccacttataccaaaggcagtgcctccacccctgtgcagggctccatcccagaagggaagccccttcggacacttctgggtgatcctgcaccgtctctctcagttgctgcctccacctcgagccagcccgtcagtcagtctcacgctcggacatcccaggcccggagcactcagccacctccccactcctctgtcaaaaaagccagtactgacctgctggctgacatcggtggagacccctttgctgcaccccagatggcaccagcttttgctgcattccctgcctttgggggccagacaccttcccaaggaggctttgccaactttgatgcctttagcagtggccccagctcttctgtgtttggaagcctccctccagctggtcaagcctcgttccaggcccagccaactcctgcagggagcagccaggggactccatttggtgccactcccctggcacccgccagtcagccaaacagcctcgcagacgtgggcagcttcctgggacccggggtgcccgctgcaggtgttcctagcagcctcttcgggatggctggccaggtccccccgctccagtctgtcacgatgggcggcggcggcggcagcagcacagggctggcctttggagccttcactaaccctttcacagctcccgccgcccagtccccgctgccttccaccaacccgttccagcccaatggcttggcgccagggcccggctttgggatgagcagtgctgggcctggcttcccccaggcagtgccacccactggggcctttgccagctccttcccagcaccgctgttccccccgcagaccccgcttgttcagcagcagaatggctcttccttcggggacttaggatcagccaagttggggcagaggccactgagccagccagctgggatctccaccaaccccttcatgactggaccctcatcaagcccattcgcctccaaacctccaaccaccaaccccttcttgtagcactgtgtttttggggggcctcttccctgccttctggggcccctctgctccctagagctctggtgaccacttgcctgtgggcatttctatgggccttggggatggtggaggtgctaatgctttgcttggggcctacaggtgaaaggtggctgccctcagattccacaaagcctctctcccctccctcgtcccacccccacccaggcaggaagcccaggaggagtgcgggcagggcctgacctggaggagtgatggttgagggggagggatttttttcaaatgatcagtcccctgtggaacagctcttccctgggcctagctcgccagcgctgtgctcctcatggacgggagcgcagtggggaaggtaggggaaagatgaggcacagtgttgatggggcagtgaccagacagtcctgagacccagaaggcccaggtggcccaagtgctcttggtggcccagcttggccagcacacactttcctcctgcagcaccccctgctgaaggggtcccccattgttttgcttccccagcgcccaggatgagcggtttaccatcgagcttacccgggcccggctcctgtcaagcactttagttagctgttggtgtcatgtttggataccagtgttttatatttatacatagagaggattttctaatatagcctattatatataaatagatctatctatatgcacatacatacatatatacacacacccagccgatctcccgctcccagactgctctcgtatgtggggaatgggatgaatccccatctgtgcctcgaccatcaaagccggagctccagggctggagggggggcagccatgtgtcctgacccccaccatccccagagcctgggttttccagggaaaggctttgtgcaattgcctggtctttttttttttttttttttctccatgtgcctccctgtccccaaatctctgcaccaaagctcattgcaggcaatgttggaaaagaactgcatttgaacgaaagagaaaacggcgcctgtggttttgcttcaggccactttgaggggttgcaggtcagtcaacatgactgatccttgacctggctctgctgggctggactgcctgggccagtgataatgctgccattggccagagacagggcagagcccgtccctgtctgaacaagagtcccgcattagcaatgagaagaagcgtggcgggagaggagccaccactgccggggactggagtttgttggatgtgaggggaatgcccactggggccagggtgggcaaaggaggttggtgccaatgtggtgctggaagtagacccctcctgggtctggaacattctctgccccaggctctttccacctggggatgttgtgacaacatccagctgtggtgtctgggctatttgtgtggtgacaagacagacctggtcagggggtgggtggcaaacacctcacctggctgggcagaggccaccttgctgtttggcccaaggccaggtgaggcccctccctttccaccattgccctggccccgtggccattcattcttggggtttgtctgagtcttccacagagagcagcaaagagatatgggagttgggtgatcagtgtatttactttgcagatttttctggaaataacctctagctgctgctatttgcaaggctgggattggcctccctgtcttttccaacaatcaggaccccatcctgtctgttcctgttcttctcccagcctctgccctccttctgtctcctgggtggtctcccgcttcgctcctggcctttgcatgttccatctcttctctttctcccctcttcgccaccctagattatctctgtgtccctctacctaattctcttaccagttctttcctttctgcttagagccggagggagggaagctggaatctgttatggtgtattagggggaggagcctttctgttatttccccccagcttccatcacccttcccttaatgccaggagcgccgaggtttggaactgaggctaaaccgaagggctttctcctgcttctgtcaccctgtgctgtctcccggcatctcctcactatctgggtccaggcccgggtcctccctgcagactccctcccctccagcccacaaggactccagcctgctggctggtgagagctggatgagcagtaagaagttaacgccaggtcagcctcgggccccagggttccctgggcacaggctgacactaggagctgctctccttggccggggacagctccagcagctcaggctccagccctccagtgagccgcctctcctggagagtagcaaagaatggagaaaggcctggcttgagaggaaatggagaaaacattgcctggtagctgcagattcaaacccaccacacacaccacggggctagagtgactcacctgggctcacaccaacttctggccaatgcagggaccatgctctgcagacagcagtcctctagcatggccccagcattcagccagtcggtcacctgtgggccatccccatgtgtgaggaagcaggagtcagccaccaagtgtctccacatcggagcttgcgggtcagacctgtgggccaggggatgggagcagggctgagggtaggggctgaatgtgtggctctgtccctgtgttgccttccacagaggagcaaggcctcaggctgaggaaggaggggcacgctggaacagcctagtctcctccccgtggattcccccaaacccataacattcttccataggggctgagaacgcagtgccccgtccctgacagggatgaaaagtgaacccctcaggtcaggagaggcagagttgaggttctgccacttcctgtccctggggagccactcaagttaccagggctaccggctgaaataaatcttttccgggtagggtcaagggcagtgtgttgccaaggcaactgatgtaggccagttgcgtgactccaggtttgtcctggtactcagtgggtccaatcacctggcattgatcacctggcattgatcagcacccaccccacccctgaggcttgcccagcccccaggccctcagatccctgctcttcctgcctttcctgcccatgtgtcacccagcacccaaggttcagtgacacagggtggtttggagctggtcactgtcatagcagctgtgatttcacaaggaagggtgctgcagggggacctggttgatggggagtgggaaggggaaggaataaagagatcttcctcaggtaaaaaaaaaaa

SEQ ID NO: 2215 - DNA, 2849 bp, Homo sapiens; identical to SEQ ID NO: 250

SEQ ID NO: 2216 - DNA, 209 bp, Homo sapiens
  misc_feature (8)..(8): n is a, c, g, or t
tctgtctnaggactttcagggaaaacaatgttgacttaccaatgggcattttcaaagactctaagttggtatgtcagtcagtgtacagacaacgtgatccgcaagcacgggcaccaccctgccgtgaaccacatctcagccaatcttccgcaaagaaatgtacccaaaaacttttctgtaaattcaggaaggtgatccacaccttccaa

SEQ ID NO: 2217 - DNA, 2867 bp, Homo sapiens
gcagacgaggcagggggaggtttgcactcggcgtggcgcgggtgagccgcgtgctctcgggcacccggccgccagttcggatgcttccgatcctcggggagccggggcgctgcgccggagtcacttcagcccatgttgttcaggtgacacccggggaagagcagactccagtgtgcaaaacgtttcggggtttccgggccagcggttccgggcgcgcctcgcgggcggcggcgcagaactacaacccccaggctccctggcgtggcggcacgtgggcccgagccgggcggccgcggatataaagcgcggcggcggctgccgggcggagcggctgcacggacaagagcggaggcctggaaggggaaactgaagcagaaagaggttacttaatgggctcaaggtcacctacctgacctaccagcagctcaatggccttcccaaagaagaaacttcagggtcttgtggctgcaaccatcacgccaatgactgagaatggagaaatcaacttttcagtaattggtcagtatgtggattatcttgtgaaagaacagggagtgaagaacatttttgtgaatggcacaacaggagaaggcctgtccctgagcgtctcagagcgtcgccaggttgcagaggagtgggtgacaaaagggaaggacaagctggatcaggtgataattcacgtaggagcactgagcttgaaggagtcacaggaactggcccaacatgcagcagaaataggagctgatggcatcgctgtcattgcaccgttcttcctcaagccatggaccaaagatatcctgattaatttcctaaaggaagtggctgctgccgcccctgccctgccattttattactatcacattcctgccttgacaggggtaaagattcgtgctgaggagttgttggatgggattctggataagatccccaccttccaagggctgaaattcagtgatacagatctcttagacttcgggcaatgtgttgatcagaatcgccagcaacagtttgctttcctttttggggtggatgagcaactgttgagtgctctggtgatgggagcaactggagcagtgggcagtacctataactacctgggaaaaaagacaaaccagatgttggaggcttttgaacaaaaggacttctctttagccctgaactatcagttttgtatccagagatttatcaactttgttgtcaaactaggttttggagtgtcacagaccaaagccatcatgactctggtctctgggattccaatgggcccaccccggcttccactgcagaaagcctccagggagtttactgatagtgctgaagctaaactgaagagcctggatttcctttctttcactgatttaaaggatggaaacttggaagctggtagctagtgcctctctatcaaatcagggtttgcaccttgagacataatctaccttaaatagtgcatttttttctcagggaattttagatgaacttgaataaactctcctagcaaatgaaatctcacaataagcattgaggtaccttttgtgagccttaaaaagtcttattttgtgaaggggcaaaaactctaggagtcacaactctcagtcattcatttcacagatttttttgtggagaaatttctgtttatatggatgaaatggaatcaagaggaaaattgtaattgattaattccatctgtctttaggagctctcattatctcggtctctggttcctaatcctattttaaagttgtctaattttaaaccactataatatgtcttcattttaataaatattcatttggaatctaggaaaactctgagctactgcatttaggcaggcactttaataccaaactgtaacatgtctcaactgtatacaactcaaaatacaccagctcatttggctgctcagtctaactctagaatggatgcttttgaattcatttcgatgtcaccacttttcgctctttaaaaacactgggtcaggtgaggacttgtttcagttcctataactaagtaaagggcggctttctcataacaaaggaaaaagtcttccccaaagatgaatttaagtctccacttttttctatacagaaaactcaaaactcaaagtttcaaagaaccaaaggactcttcctctgggcaccacaaacttccccttcctccactgagaagactgtctctcccgcaggaccctgaattattgaaatcgaaggctgacttcctttctgcagtgagcccaggggctaatgttattatcctgtcacacttgcaactagtgacttttgtttagtgatagaagatttggggaggacccaaaggactcagaactttctctccatacctccttttactcttttctttctgtgtaatgtatcaacaactgtttaatctcccttctaacaaaccttgatataagctttctgatatcaaagtatattgacagttaacccttactgattttaaacttgactatccagtctgttaattacctaagattttgttttcatttcatctctaattgttttgatcattggcagagaaagagtatttgaaattcatatcagttttgctccttattttaatctctttgaattaaaaataaaactttttcaaaatggaaatttgaaattataagtagacttcaattatctttgctaatcctctctttaattagtcagctagttaaaagttgttatattcatatatcctcaaccctctttttgcctttgtagcttttaatttcctgaaagaagaaaatgagttgttcgtttttggttctgaggatgtgatatccgtacttactgatactaaagccaaatttaaattctaaaattaattcttgggtatccaataaacaaagaactatttttcta

SEQ ID NO: 2218 - DNA, 3839 bp, Homo sapiens
tagccttctgaaggcaggaagtcagtgtctaagcggctctccaggttcttctcatttccctgtggtgtctgcacacatcctgcttaggattttcccgcccgatacctgtaccccgggttttgcgctgacacatgctccattgcttcctcgtgagagctttgcctttatctcaggcggggtgcgttttctgtgttttctgtggcaccctgtagaaacacgtggcacccttgccctctgtggctacagctgagcagacgctgggcggtgctgccctctggcacctttgggccaggttagctggggcggcctctctgccatcgggcagttgtccactgctgtgggggcccatggcagttggagcctcccagaccagcacttgggcccgtcgcccttgcccctgtccagatcctgctgtgggagcacagcctcacctgactcgggttaaggtggcgtccgtgttccatttgactgagatgacaacacttgagaacctctcaggcaggacttgtgcgagaggattgtgccccatggccctgtcccgggcccagcctccccatgcccagccatgcgcctggccccacaggcctccctcccatgctgctccctgccacggctcctcagcccacctcctccctgcttctgtctaaccaggggtcttctctctttccacggcttaaatcccacccacatgtgtgtggctcccacctggggcatcatgggcctcagccctggctgaattcaaccccagcacaaggctcccttcccagccttggaggcggcctcacattgtgcagtccaaggcctcgggtgcccatggggccacactcacgcccccatgcagccatctgcacgccctgctggcttgcagcctcccccacacccctgtcacgctcctgcccagctccccagccttgcggcactccagactcacccccaggcccacccggccccacactccagactcacctgcaggcccaccacggccccacactctagactcacccccaggcccaccctggcccccacactccagactcacctgcaggcccacccggccccacactctagactcacccccaggcccaccccggcccccacactccagactcacctgcaggcccacccggtcccacactccagactcacccccaggcccaccccggcccccacactccacactcacctgcaggcccacccggtcccacactccagactcacccgcaggcccaccccagcccccacactccagactcacctgcaggcccaccccagcccccacactccagactcacccgcaggctcaccccagcccccacactccagactcacccgcaggcccaccccagcccccacactccagactcacctgcaggcccacccggccccacactccagactcacccgcaggccccacactctggactcatctgcaggccccacactccggactcatctgcaggccccacactccggactcacccgcagacccacctggccccaccctcttgctggctcttgtcctcggcatttgtcccgcacctcgttcaccttctctcagatgctgccctgggtggagcggcaccctcccacccatgccttctccccactgctgcacagcctccctgcttgtgtgtgtgtgtggtgtccgtcctgccctccaggaggggagtggcgagcagctgcccagtgggcagggtgagcgagtgagtcctcgtgtcctggaggccctcatctgcccagacctgcacagcactgttgctctcggcaccgctggggtatggcgtctcggttcacaagcgtgaatgtgatgtgtcacagctgtgccatgagttgatctgccagatggcaaagtgcactgatcctctgcggtgaccggggctggtgcccctgggtgccctgcagtcttgttgagtttccgaagtctccaggtcatgactcgcagccactccagtgtgcacccaacattctcatcgctggacggggtcgtctgtgatgcctctgccgtgctgcccactgggctgctgtggcccccatctggtgccatttttcctccacctgggtgtcagggaagggcattctcacctgcacctgcccaggctcatgtgacggacagtgggccagcacatgtccgctccggtgccctgtcccacatgcctttcccacccacccgcctccctggccccgtgtgcccggcttcccccaatgcacaggccctcgctccgtgctgcccacatgtcctggctgcctggggcggccccccgtgtgttcatagatgacctagccatcctctcctaaacgcccagcacactgtccttgggacccatggggtgtgaccaagcaacctggcggtggctgctgaagcatgagctgtgggtgcccctggccccagggaatgtgcgctgtgttgggggagagagacgtgaagtgaaagaagggggtcctgtggtgggcacaggccacgcgttccacagaagtgcgtagagcagggtggatatgggagtgctgatgattctaaggccagttggagtaggcctcagcagggtgagacgggctacactcaaggtgttggggtgccctgagcatgtctgtccaaaagagggcctggagctgctgtgtggaagaaggcgggcgtgtggagcccatgaggactgggttgcgggggaggggttctttctgctgagatgctccggagggcgttgagctgaggaatcgcttttgaccacaggtgaccatggcactaggaagccctggggaaggtgctgctgtggccgagggggagctgccaggttgtggaaatgtaaaccccggctgcgctggtcagacctggacttcctgtagggggcgccatggaattcccacgtgggaccccagtttcctacctgtgcaccaaaattcctgtgcaccaaaattggagacgtgacaaacttaggaaaataacctcatgctctggattggagcaaggtcccagacaatacaggacaggaagctgctgccaagggaaggccacccaggaacaggacaggaagctgctgcccagggaaggccacacaggaacaggacaggaagcctgctgccgagggaaggctgcccaggaggggcagaacagagtcctcagtgtggctggtgctgtgcgcctgcctgtgctgccttaggctggacgcagggctctcaacccgtaatcctagcactctgggaggctgaggcgagcggatctgttgagcccaggagtttgagaccagcctgggcagcaaagtgagaacccttctctacaaattttttttcaaattagctgggagtgttggtgggtgcctggggtcccagctactctggaggctgcagtgggaggatcacttgagcccaggaggtggaggctgcagtgagccaagattgcaccactgcactccagcctgggcaacaggacaacaccctgtctcaaaacaaacaaaagtcagcatgagcatttcgtgtgagacagaaaaccagttcacttagatggtttctagtttcagttgacgtacgagcctgctgccagctggcctcacatctttcatgtgactctcacaaccggagacccggacattggagaaaccctcagtaagagagatccaactgggttcagaccccgaggctgtgttgacgggacatgaggcaggatatagaccaggagccacctcctgaaatttagagcaaaactacaaaacaaggcctttgggagaccagggtgggagcatcacttgagcccaggaatttgaggcaacagtgagccatgatctcaccactgtattccatccagtctggacaagagagcgagaccctgtctcgaaaaaaaaaaaaaaaaa

SEQ ID NO: 2219 - DNA, 1229 bp, Homo sapiens; identical to SEQ ID NO: 2181

SEQ ID NO: 2220 - DNA, 1510 bp, Homo sapiens
cgcggatggcgacggaaggggaggccgctcggcctggcctggagggagacctcgctctgccccgcgtcccagccatggcgacatcctcggccgcgctgccccgaatactcggcgcgggtgcccgggccccgtcgcgctggttgggctttctcgggaaggcgaccccccggcctgctcggccgagccgcaggacgcttggaagcgcgacggcccttatgatccgcgagtcggaggacagcaccgatttcaacgacaagattttgaatgagcccctcaagcactctgacttcttcaatgtcaaggaactgttttccgtgagaagcctcttcgatgcccgagtccatctgggacacaaagctggctgtcggcacaggtttatggagccgtacatctttgggagccgcctggaccacgacatcatcgacctggaacagacagccacgcacctccagctggccttgaacttcaccgcccacatggcctaccgcaagggcatcatcttgtttataagccgcaaccggcagttctcgtacctgattgagaacatggcccgtgactgtggcgagtacgcccacactcgctacttcaggggcggcatgctgaccaacgcgcgcctcctctttggccccacggtccgcctgccggacctcatcatcttcctgcacacgctcaacaacatctttgagccacacgtggccgtgagagacgcagccaagatgaacatccccacagtgggcatcgtggacaccaactgcaacccctgcctcatcacctaccctgtacccggcaatgacgactctccgctggctgtgcacctctactgcaggctcttccagacggccatcacccgggccaaggagaagcggcagcaggttgaggctctctatcgcctgcagggccagaaggagcccggggaccaggggccagcccaccctcctggggctgacatgagccattccctgtgatgttcactctcctcccaaagcaaaccacagccaagcctgtctgagctgggagtccccttccccagccctgggtcagcggcatcctcagtcgttgttacttactcagctgatgtcacagtgcagacatccaccgttccaccacagaaccagtggctgagcggaccaacgttgccatgtgcgtttgctctgtggggaacagagcacagagggtgagcgacatgtgcagaacggccccttggctgcagttaggacctcagtggctggtatggccaagctgctagaagatgctgctgtccctgtgatcccagcagccctcccttcaccgtgacccctgacctttgtcaggaaggtgcagtttttcttctcaatctaaatgcctttcaggtgggccgcttccttggctacctggttccagggggctgttttgtaatgagatgctgctggcaggccactcagaggctcccagctgggttggtgggacagccaggccagatgacctgattccagcaaaaataaaactcagatttgggcaaaatgagaaaaaa

SEQ ID NO: 2221 - DNA, 2001 bp, Homo sapiens
cactctgtaagttcaccgccggtcgggtccggccgccgcgctgtccagctcctgagaccttgctgtccgccggtctgccgtctgcgcgcctcacgctcctcagccctggaccggggacaagtaaccctcggtgacaagaccaaagtgcactgctgcccacacagttcctacctttctggcttcaattcttcagaagagtttgccgtcctttggggagaacgtgatttttgttatctcagcccactgacttcattgatctctaatcttttttaattccttgggccaactttgttcgtgcccccacactgtagccagaagcccgttggcgagctctggcacctgcaaaccaccccgtggaacgagtgtttcctctggctgagggttggagaggaggtgtggtctcagcaggcggcccgtagcctcacagccaggcctggtggtgaggtcaccatgtccaccaaggtgcccatctatctgaagcgtggcagtcgcaagggcaagaaggagaagcttcgggacctgctgtcctcggacatgatcagcccaccgctgggggacttccgccacaccattcatattggcagtggcggcggcagtgacatgtttggcgacatctccttcctgcagggcaagttccacctcctgccggggaccatggtggaggggcctgaagaagatggcaccttcgacctccccttccagttcacccgcaccgccaccgtgtgtgggcgggagctcccggacggcccatcccctctgctcaagaacgccatctccctcccggttatcggtggaccccaggctctcaccctgcccacagcccaggctccacccaagccccctcgcctgcacctggagacccctcagccttccccacaggagggagggagtgtggacatctggaggattccagagactggctcccccaacagtggactgaccccggagtcaggggccgaggagcccttcctgtccaatgccagctccctgctgtccctgcacgtggacctggggccttccatcctggatgatgtcctgcagatcatggatcaggacctggacagcatgcagatccccacataggacacgaggctgcctaggctggggtcccaggtggggcccagccaggaggtggggtgtggacccggccctggcggcggagtcagggtcccaagatcccacctgtatggtcgctggccagtgattctccttctgagccgtgtttcccctctccctccctctccacgtgggcagggcaggccccatcgctttcctctgataaccacatggacacatcctgaagtcagcccaggcgccctgagcatcttggggcacctggaccccatcacaatactccttcttccttcaggtccctgggtgaaggctttgctgaaaccgaccccccttttcacgtcccttctgcctctgccccgttggatgccctgactgggggcaggggaagagacagggcacagctggccacagggctcagccactgagcaggctgttccgggcctttggctttgcatcctggacggggagtgtcctgtcagggaccagatgtgtcctgcctcatccctagctccaatcccttccccacgtgaccggggattctggttgcaataaaacatgctgctgctggtggcggagctccctgtccctttgccccaggtttcctcccggaggcagacagtctcccagagctgagggcttgcctctggagaccccagccccagagggctttgtggaggacaggccttgccctcaagaacgtcgtacctgacgctgagcctgtcatgagaatgcaacaggagcaaaccaagtgttgctgtgacattgattcagatgtttggcaagaggtggctgagcactggggtgggcttggcactgtgccaagcctggggccaatccctgcccagtcagctggggtctggtgggggacacccaagaataaaagaataaccacaaagtgtgcaagggaaaaaaaaaaaaaaaaaaaaa

SEQ ID NO: 2222 - DNA, 1115 bp, Homo sapiens
cccacactggctaggcaggcagcacagtcccgcggacggctgagcgtgtggctgcaggagcttctgtgggagtacggtcatgagccttttgctgtactatgccctccctgccctgggcagctatgccatgctctccatcttcttcctgcgccggcctcatctgctgcacacgcccagggctcccaccttccgcatccgcctgggggcccaccgaggaggatctggagagctgctggagaacaccatggaggccatggagaactccatggcccagcgctcggacctcctggagctcgactgtcagctgacacgggacagagtggtggtggtgtcacatgatgagaacctgtgccgccagtcgggcctaaacagggatgtgggcagcctggacttcgaggacctgcccctctacaaggagaagctggaggtttacttctctccaggccactttgctcacgggtcagaccggcgcatggttcgtctggaggacctgttccagaggtttccaaggacacccatgagcgtagagatcaaagggaagaacgaagagctcatccgtgagatagcaggcttggtgagacgctatgaccgtaatgaaatcaccatctgggcctcggagaagagctcggtcatgaagaaatgcaaggctgccaaccccgagatgcccctgtccttcacaataagccgaggattctgggtgctgctttcctactacctggggctgctgcccttcatcccaatccctgagaagttcttcttctgcttcctgcccaacatcatcaacaggacctatttcccattttcctgctcttgcctgaaccagttattggctgtggtttcgaaatggctgatcatgaggaagagtctgatccgacacttggaggagcgaggggtgcaggtggtcttttggtgccttaatgaagagtcggattttgaagcagccttcagcgtgggagccactggcgtcataacggattatcccacagccctgcggcactacctggacaaccatggaccagctgcccggacctcctaagtccagaagcctcgaggtctcctgtttctcttcctgaaaaataaatatttgcctttcgatcaaaaaaaaaaaaaaaaaa

SEQ ID NO: 2223 - DNA, 4041 bp, Homo sapiens
ggccacatgtcgcgcatgtcttcccgtcggacggcgtgccacctcgccgcgcagctttacgaacctagagcagcgccgccccgcctcctgtctccgtcctcacctccccgccccctcccagcttcgcgtctcctagctcgacgcgcccgctataatcacgtgattgcctcatccgggtcttttgcgttctctttccctctcccaacatggcggcctcagcaaaaaagaagaataagaaggggaagactatctccctaacagactttctggctgaggatgggggtactggtggaggaagcacctatgtttccaaaccagtcagctgggctgatgaaacggatgacctggaaggagatgtttcgaccacttggcacagtaacgatgacgatgtgtatagggcgcctccaattgaccgttccatccttcccactgctccacgggctgctcgggaacccaatatcgaccggagccgtcttcccaaatcgccaccctacactgcttttctaggaaacctaccctatgatgttacagaagagtcaattaaggaattctttcgaggattaaatatcagtgcagtgcgtttaccacgtgaacccagcaatccagagaggttgaaaggttttggttatgctgaatttgaggacctggattccctgctcagtgccctgagtctcaatgaagagtctctaggtaacaggagaattcgagtggacgttgctgatcaagcacaggataaagacagggatgatcgttcttttggccgtgatagaaatcgggattctgacaaaacagatacagactggagggctcgtcctgctacagacagctttgatgactacccacctagaagaggtgatgatagctttggagacaagtatcgagatcgttatgattcagaccggtatcgggatgggtatcgggatgggtatcgggatggcccacgccgggatatggatcgatatggtggccgggatcgctatgatgaccgaggcagcagagactatgatagaggctatgattcccggataggcagtggcagaagagcatttggcagtgggtatcgcagggatgatgactacagaggaggcggggaccgctatgaagaccgatatgacagacgggatgatcggtcgtggagctccagagatgattactctcgggatgattataggcgtgatgatagaggtcccccccaaagacccaaactgaatctaaagcctcggagtactcctaaggaagatgattcctctgctagtacctcccagtccactcgagctgcttctatctttggaggggcaaagcctgttgacacagctgctagagaaagagaagtagaagaacggctacagaaggaacaagagaagttgcagcgtcagctggatgagccaaaactagaacgacggcctcgggagagacacccaagctggcgaagtgaagaaactcaggaacgggaacggtcgaggacaggaagtgagtcatcacaaactgggacctccaccacatctagcagaaatgcacgaaggagagagagtgagaagtctctagaaaatgaaacactcaataaggaggaagattgccactctccaacttctaaacctcccaaacctgatcagcccctaaaggtaatgccagcccctccaccaaaggagaatgcttgggtgaagcgaagttctaaccctcctgctcgatctcagagctcagacacagagcagcagtcccctacaagtggtgggggaaaagtagctccagctcaaccatctgaggaaggaccaggaaggaaagatgaaaataaagtagatgggatgaatgccccaaaaggccaaactgggaactctagccgtggtccaggagacggagggaacagagaccactggaaggagtcagataggaaagatggcaaaaaggatcaagactccagatctgcacctgagccaaagaaacctgaggaaaatccagcttccaagttcagttctgcaagcaagtatgctgctctctctgttgatggtgaagatgaaaatgagggagaagattatgccgaatagacctctacatcctgtgcttttctcctagtttctctccaccctggaacattcgagagcaaatcaaaacctctatccagacaagacaaaataaaactcaccatctcctgaagacctttcttacctttttttaaaaacaaaaaatgaaattattttgcatgctgctgcagcctttaaagtattgaagtaactggagaattgccaatacagccagagagaaagggactacagctttttagaggaaaagttgtggtgcgttatgtcaccatgcagttgccagtgtgattagtgcctaggggtctccatttagcagaaatggtaatgacagtgatataatgcctggaacctggttgggcagtaggggagggaggtagaaggaaaagtgtgagatttctaccttttagtttttatcctattgtggcatatatgaattctcaaacattatctgaataaattttccactcttggaaaggtagatttagcctcaagttgttctagtctccaggaggctgccagcccctcctcttatttaattctgagttttgggggccagcctagagggaattccttttttttttttaaccccccaggggggtagttgggagtgagactataggccataaagaatgggactgcattggaccaaaataaatgggaaaatcgtggtttgaaaagaagcttttgggaagtgatgagtcattttgcaccaggtaataggggaaaattgtgtgacctccagcaaacacatgaatggttatttcctggagccggaagcacttgggggtcgtggtaattcccagtgttttctgtgtcctagttttaccctttctaaacactgtcctttttgaaagttttgaatatatccacattctattgaaaccttgaaactaaaaatttagactcttatcatcatcttaagttcttcatgctactcttaacctcccaaaaagcagtatctaagtcacatacatgatgtcttgggcattttctcagccatggagaactctgaaaggaagaatcgctgcttttctcaagcaaatcggtttcttgatgtcttttggttctccttgcctgctcctgatgcttggaccccttttattgatcagagtgctctagaataatggatggtcttggatgatggataaatagggacagggacagttaaattgggagcctttcttacaaccttgatgggatttttccccccaagtttccttctccactgaaatgccacactaatgcttgttggattcatgaggtggccagaccaatgtgttgttttgttgttgtttttttaagcttcccttgagagaataaatggtaatggagagaactatttaacaaggtcctggtttctcttgcaacacagtagctaaacttgcctgcttttatatgcatttttgtagggatcagcttggtagacagtattagcggagaaacaccttgatcttggtttgcaagcccttctcccatcagtcctagattaggccctgttcagccatgcaggggtgttggtttatgcgtgctgcagcagtgggcataatgaatataatttacccagtggacaaaggtgtgtaccaagtgaatttaaataattggtgtggattggccagtagctaagaagtgggcttttaaagagtattgaagattgaaagggtttttctttcttttttaaaaaagaaaaacaaactattgattgtagataatgaaaagctagggtttgccctcttcatgtctactctccttccaaatagttatatccaaaactgtttttccctctcccctaccttgtcccccctattaaaatagaaacagggattgattaatgtcccgctcctgaatacatgtaaaatttgtacaaaaatatcttctatgaaaatgatttgtaatctgtagacttattacctgggagatgtcttgatgtaaaatcccatcctttgggttgtgggttttttgttttctccaaataaatctgatctttaaagttcaaaaaaaaaaaaaa

SEQ ID NO: 2224 - DNA, 309 bp, Homo sapiens
atgccctttttcttaactccatttgaaccagctcacatcgatgggcacaagcgtcgccaggaaattcagtgtggtaagcttggcacctactcatggccaccgtgtcctgaactccctttcctgtgctcaggccccagcccacgcagcaggaggacacactgccgaagggaccagttggacggccttctggctttagcgcctgtgcctttcaggaccttaaatacagaaaggaaccgagtgctctgtgcagcccctccaagacggtcgctacagcgccagcaccacctgcgccgggccatcatgccgtga

SEQ ID NO: 2225 - DNA, 1785 bp, Homo sapiens
ctttgcaaattgccctagtaacggccgcatggtaactcaggcgccgggcgcactgtcctagctgctggttttccacgctggttttagctcccggcgtctgcaaaatgaagattgaggaggtgaagagcactacgaagacgcagcgcatcgcctcccacagccacgtgaaagggctggggctggacgagagcggcttggccaagcaggcggcctcagggcttgtgggccaggagaacgcgcgagaggcatgtggcgtcatagtagaattaatcaaaagcaagaaaatggctggaagagctgtcttgttggcaggacctcctggaactggcaagacagctctggctctggctattgctcaggagctgggtagtaaggtccccttctgcccaatggtggggagtgaagtttactcaactgagatcaagaagacagaggtgctgatggagaacttccgcagggccattgggctgcgaataaaggagaccaaggaagtttatgaaggtgaagtcacagagctaactccgtgtgagacagagaatcccatgggaggatatggcaaaaccattagccatgtgatcataggactcaaaacagccaaaggaaccaaacagttgaaactggaccccagcatttttgaaagtttgcagaaagagcgagtagaagctggagatgtgatttacattgaagccaacagtggggccgtgaagaggcagggcaggtgtgatacctatgccacagaattcgaccttgaagctgaagagtatgtccccttgccaaaaggggatgtgcacaaaaagaaagaaatcatccaagatgtgaccttgcatgacttggatgtggctaatgcgcggccccaggggggacaagatatcctgtccatgatgggccagctaatgaagccaaagaagacagaaatcacagacaaacttcgaggggagattaataaggtggtgaacaagtacatcgaccagggcattgctgagctggtcccgggtgtgctgtttgttgatgaggtccacatgctggacattgagtgcttcacctacctgcaccgcgccctggagtcttctatcgctcccatcgtcatctttgcatccaaccgaggcaactgtgtcatcagaggcactgaggacatcacatcccctcacggcatccctcttgaccttctggaccgagtgatgataatccggaccatgctgtatactccacaggaaatgaaacagatcattaaaatccgtgcccagacggaaggaatcaacatcagtgaggaggcactgaaccacctgggggagattggcaccaagaccacactgaggtactcagtgcagctgctgaccccggccaacttgcttgctaaaatcaacgggaaggacagcattgagaaagagcatgtcgaagagatcagtgaacttttctatgatgccaagtcctccgccaaaatcctggctgaccagcaggataagtacatgaagtgagatggctgaggttttcagcagtaagagactccccaggtgtgcctggcctgggtccagcctgtgggcgcttgcccctgggcttggggctgccgtccccactcaggcgtggtctgcagcgctgtcagttcagtgtggaaagcatttctttttaagttatcgtaactgttcctgtggttgctttgaaagaacccttccttacctggtgtgttttctataaatcttcataggttattttgattctctctctctctctctctaagttttttaaaaataaacttttcagaacagttttaaaaaaaaaaaaaaaaaa

SEQ ID NO: 2226 - DNA, 3145 bp, Homo sapiens
aaagtctatacgcaataagtaagcccaaagaggcatgtttgcttggcgatgcccagcagataagccaggcaaacctcggtgtgatcgaagaagccaatttgagactcagcctagtccaggcaagctactggcacctgctgctctcaactaacctccacacaatggtgttcgcattttggaaggtctttctgatcctaagctgccttgcaggtcaggttagtgtggtgcaagtgaccatcccagacggtttcgtgaacgtgactgttggatctaatgtcactctcatctgcatctacaccaccactgtggcctcccgagaacagctttccatccagtggtctttcttccataagaaggagatggagccaatttctatttacttttctcaaggtggacaagctgtagccatcgggcaatttaaagatcgaattacagggtccaacgatccaggtaatgcatctatcactatctcgcatatgcagccagcagacagtggaatttacatctgcgatgttaacaaccccccagactttctcggccaaaaccaaggcatcctcaacgtcagtgtgttagtgaaaccttctaagcccctttgtagcgttcaaggaagaccagaaactggccacactatttccctttcctgtctctctgcgcttggaacaccttcccctgtgtactactggcataaacttgagggaagagacatcgtgccagtgaaagaaaacttcaacccaaccaccgggattttggtcattggaaatctgacaaattttgaacaaggttattaccagtgtactgccatcaacagacttggcaatagttcctgcgaaatcgatctcacttcttcacatccagaagttggaatcattgttggggccttgattggtagcctggtaggtgccgccatcatcatctctgttgtgtgcttcgcaaggaataaggcaaaagcaaaggcaaaagaaagaaattctaagaccatcgcggaacttgagccaatgacaaagataaacccaaggggagaaagcgaagcaatgccaagagaagacgctacccaactagaagtaactctaccatcttccattcatgagactggccctgataccatccaagaaccagactatgagccaaagcctactcaggagcctgccccagagcctgccccaggatcagagcctatggcagtgcctgaccttgacatcgagctggagctggagccagaaacgcagtcggaattggagccagagccagagccagagccagagtcagagcctggggttgtagttgagcccttaagtgaagatgaaaagggagtggttaaggcataggctggtggcctaagtacagcattaatcattaaggaacccattactgccatttggaattcaaataacctaaccaacctccacctcctccttccattttgaccaaccttcttctaacaaggtgctcattcctactatgaatccagaataaacacgccaagataacagctaaatcagcaagggttcctgtattaccaatatagaatactaacaattttactaacacgtaagcataacaaatgacagggcaagtgatttctaacttagttgagttttgcaacagtacctgtgttgttatttcagaaaatattatttctctctttttaactactctttttttttattttagacagagtcttgctccgtcgcgcaggctgtgatcgtagtggtgcgatctcggctcactgcaacctccgctccctgggttcaagcgattctcctgcctgagcctcctgagtagctgggactacaggcacgtgccaccacgcccggctaattttttgtatttttagtagagatggggtttcacgttgttagccaggatggtctccatctcctgacctcatgatccgcccaccttggcctcccaaaatgctgggattacaggcatgagccactgcgcccggcctctttttagctactcttatgttccacatgcacatatgacaaggtggcattaattagattcaatattatttctaggaatagttcctcattcatttttatattgaccactaagaaaataattcatcagcattatctcatagattggaaaattttctccaaatacaatagaggagaatatgtaaagggtatacattaattggtacgtagcatttaaaatcaggtcttataattaatgcttcattcctcatattagatttcccaagaaatcaccctggtatccaatatctgagcatggcaaatttaaaaaataacacaatttcttgcctgtaaccctagcactttgggaggccgaggcaggtggatcacctgaggtcaggagttcgagaccagcctggccaacatggcgaaaccccttctctactaaaaatacaaaaattagctgggcgtggtagtgcatgcctgtaatcccagctacttgggaggctgaggcaggagaatcgcttgaacccaggaggtggaggttgcagtgagccgagattgtgccactgcactccaacctgggtgacagagtgagattccatctgaaaaacaaaaacaaaaacagaaaacaaacaaacaaaaaacaaaaaatccccacaactttgtcaaataatgtacaggcaaacactttcaaatataatttccttcagtgaatacaaaatgttgatatcataggtgatgtacaatttagttttgaatgagttattatgttatcactgtgtctgatgttatctactttgaaaggcagtccagaaaagtgttctaagtgaactcttaagatctattttagataatttcaactaattaaataacctgttttactgcctgtacattccacattaataaagcgataccaatcttatatgaatgctaatattactaaaatgcactgatatcacttcttcttcccctgttgaaaagctttctcatgatcatatttcacccacatctcaccttgaagaaacttacaggtagacttaccttttcacttgtggaattaatcatatttaaatcttactttaaggctcaataaataatactcataatgtctcattttagtgactcctaaggctagtccttttataaacaactttttctgacatagcatttatgtataataaaccagacatttaaagtgtaaaaaaaaaaaaaaaaaa

SEQ ID NO: 2227 - DNA, 373 bp, Homo sapiens
tttttttttaaagacagggtctcggtatgttgcccaggccagtctcaaactcctggcctcaggagtcctccccgaagactgggattataggcaggaggcgccgggcctggcctctatttctttaatacctgccctcagagccgtcctgcttttaaactgatgcaaatggcagcagtgaataatcaattcatgggttcgcttgctttgggatttagtacaagattattttaagaaataacaaaggagaaaagattgagctggattttgctgattctcaggtatctgtaccccagggtcaaccctgagattggcccaatctgccagaacctaagatgccattttgaccccagtggcagcttccagagccacaagc

SEQ ID NO: 2228 - DNA, 1771 bp, Homo sapiens; identical to SEQ ID NO: 1674

SEQ ID NO: 2229 - DNA, 4241 bp, Homo sapiens
actggctccgcgagcctggcccgggggagtcggctggagccggctgcgctttgataaggtcctggcaactcagtaacagcccgagagccgggaaataaaaataacccctcagagcgatggatttcggggccgcccggcggccgaggcgcccgccgaaggccctgctgtaaaagagaggaggttcagatgagcccctgctgacttgagagagacagagagaccacgccgattgctgagaggaactggaagaagaaaaattcccagactcagtgggaagagctccctcaccatgagtagcgctatgttggtgacttgcctcccggaccccagcagcagcttccgtgaggatgccccgcggcccccagtgccaggggaagaaggggagaccccaccgtgtcagccaggggtgggcaagggccaggtcaccaaacccatgcctgtctcttccaacaccaggcggaacgaagatgggttgggggagccggaggggcgggcatctccggattcccctctgacccggtggaccaagtccttacactccttattgggcgatcaagacggtgcttacctgttccgaactttcctggagagggagaaatgcgtggataccttagacttctggtttgcctgcaatggattcaggcagatgaacctgaaggataccaaaactttacgagtagccaaagcgatctacaaaaggtacattgagaacaacagcattgtctccaagcagctgaagcctgccaccaagacctacataagagatggcatcaagaagcagcagattgattccatcatgtttgaccaggcgcagaccgagatccagtcggtgatggaggaaaatgcctaccagatgtttttgacttctgatatatacctcgaatatgtgaggagtgggggagaaaacacagcttacatgagtaatgggggactcgggagcctaaaggtcgtgtgtggctatctccccaccttgaatgaagaagaggagtggacttgtgccgacttcaagtgcaaactttcgccaaccgtggttggcttgtccagcaaaactctgagggccacggcgagtgtgaggtccacggaaactgttgacagtggatacaggtccttcaagaggagcgatcctgttaatccttatcacataggttctggctatgtctttgcaccagccaccagcgccaacgacagtgagatatccagtgatgcgctgacggatgattccatgtccatgacggacagcagtgtagatggaattcctccttatcgtgtgggcagtaagaaacagctccagagagaaatgcatcgcagtgtgaaggccaatggccaagtgtctctacctcatttcccgagaacccaccgcctgcccaaggagatgacccccgtggaacccgccacctttgcagctgagctgatctcgaggctggaaaagctgaagctggagttggagagccgccacagcctggaggagcgcctgcagcagatccgagaggatgaagagagagagggctccgagctcacactcaattcgcgggagggggcgcccacgcagcaccccctctccctactgccctccggcagctacgaggaagacccgcagacgatactggacgatcacctgtccagggtcctcaagacccctggctgccagtctccaggcgtaggccgctatagcccccgctcccgctccccggaccaccaccaccaccaccattcgcagtaccactccctgctcccgcccggtggcaagctgcctcccgcggccgcctcgccgggcgcctgccccctcctcgggggcaaaggctttgtgaccaagcagacgacgaagcatgtccaccaccactacatccaccaccatgccgtccccaagaccaaggaggagatcgaggcggaggccacgcagcgggtgcactgcttctgccctgggggcagcgagtattactgctactcgaaatgcaaaagccactccaaggctccggaaaccatgcccagcgagcagtttggcggcagcagaggcagtaccttgcccaaacgcaatgggaaaggcacggagccgggcctggccctgcccgccagggaaggaggggcccccggcggagctggggccctgcagcttccccgggaggaaggagacaggtcgcaggatgtctggcagtggatgctggagagtgagcggcagagcaagcccaagccccatagtgcccaaagcacaaaaaaggcctaccccttggagtctgcccgctcgtctccaggcgaacgagccagccggcaccatctgtgggggggcaacagcgggcacccccgcaccaccccccgtgcccacctgttcacccaggaccctgcgatgcctcccctgaccccacccaacacgctggctcagctggaggaggcctgtcgcaggctagctgaggtgtcgaagcccccaaagcagcggtgctgtgtggccagtcagcagagggacaggaatcattcggccactgttcagacgggagccacacccttctccaatccaagcctggctccagaagatcacaaagagccaaagaaactggcaggtgtccacgcgctccaggccagtgagttggttgtcacttactttttctgtggggaagaaattccataccggaggatgctgaaggctcagagcttgaccctgggccactttaaagagcagctcagcaaaaagggaaattataggtattacttcaaaaaagcaagcgatgagtttgcctgtggagcggtgtttgaggagatctgggaggatgagacggtgctcccgatgtatgaaggccggattctgggcaaagtggagcggatcgattgagccctggggtctggctttggtgaactgttggagcccgaagctcttgtgaactgtcttggctgtgagcaactgcgacaaaacattttgaaggaaaattaaaccaatgaagaagacaaagtctaaggaagaatcggccagtgggccttcgggagggcggggggaggttgattttcatgattcatgagctgggtactgactgagataagaaaagcctgaactatttattaaaaacatgaccactcttggctattgaagatgctgcctgtatttgagagactgccatacataatatatgacttcctagggatctgaaatccataaactaagagaaactgtgtatagcttacctgaacaggaatccttactgatatttatagaacagttgatttcccccatccccagtttatggatatgctgctttaaacttggaagggggagacaggaagttttaattgttctgactaaacttaggagttgagctaggagtgcgttcatggtttcttcactaacagaggaattatgctttgcactacgtccctccaagtgaagacagactgttttagacagactttttaaaatggtgccctaccattgacacatgcagaaattggtgcgttttgtttttttttttcctatgctgctctgttttgtcttaaaggtcttgagggttgaccatgttgcgtcatcatcaacattttgggggttgtgttggatgggatgatctgttgcagagggagaggcagggaaccctgctccttcgggccccaggttgatcctgtgactgaggctccccctcatgtagcctccccaggcccagggccctgaggcctgctagaatcactgccgctgtgctttcgtggaaatgacagttccttgttttttttgtttctgtttttgttttacattagtcattggaccacagccattcaggaactaccccctgccccacaaagaaatgaacagttgtagggagacccagcagcacctttcctccacacaccttcattttgatgttcgggtttttgtgttaagttaatctgtacattctgtttgccattgttacttgtactatacatctgtatatagtgtacggcaaaagagtattaatccactatctctagtgcttgactttaaatcagtacagtacctgtacctgcacggtcacccgctccgtgtgtcgccctatattgagggctcaagctttcccttgttttttgaaaggggtttatgtataaatatattttatgcctttttattacaagtcttgtactcaatgacttttgtcatgacattttgttctacttatactgtaaattatgcattataaagagttcatttaaggaaaattacttggtacaataattattgtaattaagagatgtagcctttattaaaattttatatttttcaaaaaaaaaaa

SEQ ID NO: 2230 - DNA, 312 bp, Homo sapiens
gtcatcttcatgtccaaagttcaatgttaatttacccatagtcatgagggcagggatcagcagcatcacggtctgatgaacattttcagcactgtacccagtgctccatggatctcaggttatcttttattattaaacccatttaataagagagatggcagttgaaaaattgaaggatttagagctagaaggcatcactggagcagaaagaaacagcatagccttcaggtcaacttgatactcttcccccatctcattccttctcactagaatagccacattcataattggaagcctagccagctcaggcca

SEQ ID NO: 2231 - DNA, 3967 bp, Homo sapiens
caaagtccaggcccctctgctgcagcgcccgcgcgtccagaggccctgccagacacgcgcgaggttcgaggctgagatggatcttgaggcggcaaagaacggaacagcctggcgccccacgagcgcggagggcgactttgaactgggcatcagcagcaaacaaaaaaggaaaaaaacgaagacagtgaaaatgattggagtattaacattgtttcgatactccgattggcaggataaattgtttatgtcgctgggtaccatcatggccatagctcacggatcaggtctccccctcatgatgatagtatttggagagatgactgacaaatttgttgatactgcaggaaacttctcctttccagtgaacttttccttgtcgctgctaaatccaggcaaaattctggaagaagaaatgactagatatgcatattactactcaggattgggtgctggagttcttgttgctgcctatatacaagtttcattttggactttggcagctggtcgacagatcaggaaaattaggcagaagttttttcatgctattctacgacaggaaataggatggtttgacatcaacgacaccactgaactcaatacgcggctaacagatgacatctccaaaatcagtgaaggaattggtgacaaggttggaatgttctttcaagcagtagccacgttttttgcaggattcatagtgggattcatcagaggatggaagctcacccttgtgataatggccatcagccctattctaggactctctgcagccgtttgggcaaagatactctcggcatttagtgacaaagaactagctgcttatgcaaaagcaggcgccgtggcagaagaggctctgggggccatcaggactgtgatagctttcgggggccagaacaaagagctggaaaggtatcagaaacatttagaaaatgccaaagagattggaattaaaaaagctatttcagcaaacatttccatgggtattgccttcctgttaatatatgcatcatatgcactggccttctggtatggatccactctagtcatatcaaaagaatatactattggaaatgcaatgacagtttttttttcaatcctaattggagctttcagtgttggccaggctgccccatgtattgatgcttttgccaatgcaagaggagcagcatatgtgatctttgatattattgataataatcctaaaattgacagtttttcagagagaggacacaaaccagacagcatcaaagggaatttggagttcaatgatgttcacttttcttacccttctcgagctaacgtcaagatcttgaagggcctcaacctgaaggtgcagagtgggcagacggtggccctggttggaagtagtggctgtgggaagagcacaacggtccagctgatacagaggctctatgaccctgatgagggcacaattaacattgatgggcaggatattaggaactttaatgtaaactatctgagggaaatcattggtgtggtgagtcaggagccggtgctgttttccaccacaattgctgaaaatatttgttatggccgtggaaatgtaaccatggatgagataaagaaagctgtcaaagaggccaacgcctatgagtttatcatgaaattaccacagaaatttgacaccctggttggagagagaggggcccagctgagtggtgggcagaagcagaggatcgccattgcacgtgccctggttcgcaaccccaagatccttctgctggatgaggccacgtcagcattggacacagaaagtgaagctgaggtacaggcagctctggataaggccagagaaggccggaccaccattgtgatagcacaccgactgtctacggtccgaaatgcagatgtcatcgctgggtttgaggatggagtaattgtggagcaaggaagccacagcgaactgatgaagaaggaaggggtgtacttcaaacttgtcaacatgcagacatcaggaagccagatccagtcagaagaatttgaactaaatgatgaaaaggctgccactagaatggccccaaatggctggaaatctcgcctatttaggcattctactcagaaaaaccttaaaaattcacaaatgtgtcagaagagccttgatgtggaaaccgatggacttgaagcaaatgtgccaccagtgtcctttctgaaggtcctgaaactgaataaaacagaatggccctactttgtcgtgggaacagtatgtgccattgccaatggggggcttcagccggcattttcagtcatattctcagagatcatagcgatttttggaccaggcgatgatgcagtgaagcagcagaagtgcaacatattctctttgattttcttatttctgggaattatttctttttttactttcttccttcagggtttcacgtttgggaaagctggcgagatcctcaccagaagactgcggtcaatggcttttaaagcaatgctaagacaggacatgagctggtttgatgaccataaaaacagtactggtgcactttctacaagacttgccacagatgctgcccaagtccaaggagccacaggaaccaggttggctttaattgcacagaatatagctaaccttggaactggtattatcatatcatttatctacggttggcagttaaccctattgctattagcagttgttccaattattgctgtgtcaggaattgttgaaatgaaattgttggctggaaatgccaaaagagataaaaaagaactggaagctgctggaaagattgcaacagaggcaatagaaaatattaggacagttgtgtctttgacccaggaaagaaaatttgaatcaatgtatgttgaaaaattgtatggaccttacaggaattctgtgcagaaggcacacatctatggaattacttttagtatctcacaagcatttatgtatttttcctatgccggttgttttcgatttggtgcatatctcattgtgaatggacatatgcgcttcagagatgttattctggtgttttctgcaattgtatttggtgcagtggctctaggacatgccagttcatttgctccagactatgctaaagctaagctgtctgcagcccacttattcatgctgtttgaaagacaacctctgattgacagctacagtgaagaggggctgaagcctgataaatttgaaggaaatataacatttaatgaagtcgtgttcaactatcccacccgagcaaacgtgccagtgcttcaggggctgagcctggaggtgaagaaaggccagacactagccctggtgggcagcagtggctgtgggaagagcacggtggtccagctcctggagcggttctacgaccccttggcggggacagtgcttctcgatggtcaagaagcaaagaaactcaatgtccagtggctcagagctcaactcggaatcgtgtctcaggagcctatcctatttgactgcagcattgccgagaatattgcctatggagacaacagccgggttgtatcacaggatgaaattgtgagtgcagccaaagctgccaacatacatcctttcatcgagacgttaccccacaaatatgaaacaagagtgggagataaggggactcagctctcaggaggtcaaaaacagaggattgctattgcccgagccctcatcagacaacctcaaatcctcctgttggatgaagctacatcagctctggatactgaaagtgaaaaggttgtccaagaagccctggacaaagccagagaaggccgcacctgcattgtgattgctcaccgcctgtccaccatccagaatgcagacttaatagtggtgtttcagaatgggagagtcaaggagcatggcacgcatcagcagctgctggcacagaaaggcatctatttttcaatggtcagtgtccaggctgggacacagaacttatgaacttttgctacagtatattttaaaaataaattcaaattattctaccatttt

SEQ ID NO: 2232 - DNA, 1493 bp, Homo sapiens; identical to SEQ ID NO: 898

SEQ ID NO: 2233 - DNA, 5143 bp, Homo sapiens; identical to SEQ ID NO: 2021

SEQ ID NO: 2234 - DNA, 5053 bp, Homo sapiens
tgcagacagtgcgggcctgcgcccagtcccggctgtcctcgccgcgacccctcctcagccctgggcgcgcgcacgctggggccccgcggggctggccgcctagcgagcctgccggtcgaccccagccagcgcagcgacggggcgctgcctggcccaggcgcacacggaagtgcgcttctctgaagtagctttggaaagtagagaagaaaatccagtttgcttcttggagaacactggacagctgaataaatgcagtatctaaatataaaagaggactgcaatgccatggctttctgtgctaaaatgaggagctccaagaagactgaggtgaacctggaggcccctgagccaggggtggaagtgatcttctatctgtcggacagggagcccctccggctgggcagtggagagtacacagcagaggaactgtgcatcagggctgcacaggcatgccgtatctctcctctttgtcacaacctctttgccctgtatgacgagaacaccaagctctggtatgctccaaatcgcaccatcaccgttgatgacaagatgtccctccggctccactaccggatgaggttctatttcaccaattggcatggaaccaacgacaatgagcagtcagtgtggcgtcattctccaaagaagcagaaaaatggctacgagaaaaaaaagattccagatgcaacccctctccttgatgccagctcactggagtatctgtttgctcagggacagtatgatttggtgaaatgcctggctcctattcgagaccccaagaccgagcaggatggacatgatattgagaacgagtgtctagggatggctgtcctggccatctcacactatgccatgatgaagaagatgcagttgccagaactgcccaaggacatcagctacaagcgatatattccagaaacattgaataagtccatcagacagaggaaccttctcaccaggatgcggataaataatgttttcaaggatttcctaaaggaatttaacaacaagaccatttgtgacagcagcgtgtccacgcatgacctgaaggtgaaatacttggctaccttggaaactttgacaaaacattacggtgctgaaatatttgagacttccatgttactgatttcatcagaaaatgagatgaattggtttcattcgaatgacggtggaaacgttctctactacgaagtgatggtgactgggaatcttggaatccagtggaggcataaaccaaatgttgtttctgttgaaaaggaaaaaaataaactgaagcggaaaaaactggaaaataaacacaagaaggatgaggagaaaaacaagatccgggaagagtggaacaatttttcttacttccctgaaatcactcacattgtaataaaggagtctgtggtcagcattaacaagcaggacaacaagaaaatggaactgaagctctcttcccacgaggaggccttgtcctttgtgtccctggtagatggctacttccggctcacagcagatgcccatcattacctctgcaccgacgtggcccccccgttgatcgtccacaacatacagaatggctgtcatggtccaatctgtacagaatacgccatcaataaattgcggcaagaaggaagcgaggaggggatgtacgtgctgaggtggagctgcaccgactttgacaacatcctcatgaccgtcacctgctttgagaagtctgagcaggtgcagggtgcccagaagcagttcaagaactttcagatcgaggtgcagaagggccgctacagtctgcacggttcggaccgcagcttccccagcttgggagacctcatgagccacctcaagaagcagatcctgcgcacggataacatcagcttcatgctaaaacgctgctgccagcccaagccccgagaaatctccaacctgctggtggctactaagaaagcccaggagtggcagcccgtctaccccatgagccagctgagtttcgatcggatcctcaagaaggatctggtgcagggcgagcaccttgggagaggcacgagaacacacatctattctgggaccctgatggattacaaggatgacgaaggaacttctgaagagaagaagataaaagtgatcctcaaagtcttagaccccagccacagggatatttccctggccttcttcgaggcagccagcatgatgagacaggtctcccacaaacacatcgtgtacctctatggcgtctgtgtccgcgacgtggagaatatcatggtggaagagtttgtggaagggggtcctctggatctcttcatgcaccggaaaagcgatgtccttaccacaccatggaaattcaaagttgccaaacagctggccagtgccctgagctacttggaggataaagacctggtccatggaaatgtgtgtactaaaaacctcctcctggcccgtgagggcatcgacagtgagtgtggcccattcatcaagctcagtgaccccggcatccccattacggtgctgtctaggcaagaatgcattgaacgaatcccatggattgctcctgagtgtgttgaggactccaagaacctgagtgtggctgctgacaagtggagctttggaaccacgctctgggaaatctgctacaatggcgagatccccttgaaagacaagacgctgattgagaaagagagattctatgaaagccggtgcaggccagtgacaccatcatgtaaggagctggctgacctcatgacccgctgcatgaactatgaccccaatcagaggcctttcttccgagccatcatgagagacattaataagcttgaagagcagaatccagatattgtttcagaaaaaaaaccagcaactgaagtggaccccacacattttgaaaagcgcttcctaaagaggatccgtgacttgggagagggccactttgggaaggttgagctctgcaggtatgaccccgaaggggacaatacaggggagcaggtggctgttaaatctctgaagcctgagagtggaggtaaccacatagctgatctgaaaaaggaaatcgagatcttaaggaacctctatcatgagaacattgtgaagtacaaaggaatctgcacagaagacggaggaaatggtattaagctcatcatggaatttctgccttcgggaagccttaaggaatatcttccaaagaataagaacaaaataaacctcaaacagcagctaaaatatgccgttcagatttgtaaggggatggactatttgggttctcggcaatacgttcaccgggacttggcagcaagaaatgtccttgttgagagtgaacaccaagtgaaaattggagacttcggtttaaccaaagcaattgaaaccgataaggagtattacaccgtcaaggatgaccgggacagccctgtgttttggtatgctccagaatgtttaatgcaatctaaattttatattgcctctgacgtctggtcttttggagtcactctgcatgagctgctgacttactgtgattcagattctagtcccatggctttgttcctgaaaatgataggcccaacccatggccagatgacagtcacaagacttgtgaatacgttaaaagaaggaaaacgcctgccgtgcccacctaactgtccagatgaggtttatcaacttatgaggaaatgctgggaattccaaccatccaatcggacaagctttcagaaccttattgaaggatttgaagcacttttaaaataagaagcatgaataacatttaaattccacagattatcaagtccttctcctgcaacaaatgcccaagtcattttttaaaaatttctaatgaaagaagtttgtgttctgtccaaaaagtcactgaactcatacttcagtacatatacatgtataaggcacactgtagtgcttaatatgtgtaaggacttcctctttaaatttggtaccagtaacttagtgacacataatgacaaccaaaatatttgaaagcacttaagcactcctccttgtggaaagaatataccaccatttcatctggctagttcaccatcacaactgcattaccaaaaggggatttttgaaaacgaggagttgaccaaaataatatctgaagatgattgcttttccctgctgccagctgatctgaaatgttttgctggcacattaatcatagataaagaaagattgatggacttagccctcaaatttcagtatctatacagtactagaccatgcattcttaaaatattagataccaggtagtatatattgtttctgtacaaaaatgactgtattctctcaccagtaggacttaaactttgtttctccagtggcttagctcctgttcctttgggtgatcactagcacccatttttgagaaagctggttctacatggggggatagctgtggaatagataatttgctgcatgttaattctcaagaactaagcctgtgccagtgctttcctaagcagtatacctttaatcagaactcattcccagaacctggatgctattacacatgcttttaagaaacgtcaatgtatatccttttataactctaccactttggggcaagctattccagcactggttttgaatgctgtatgcaaccagtctgaataccacatacgctgcactgttcttagagggtttccatacttaccaccgatctacaagggttgatccctgtttttaccatcaatcatcaccctgtggtgcaacacttgaaagacccggctagaggcactatggacttcaggatccactagacagttttcagtttgcttggaggtagctgggtaatcaaaaatgtttagtcattgattcaatgtgaacgattacggtctttatgaccaagagtctgaaaatctttttgttatgctgtttagtattcgtttgatattgttacttttcacctgttgagcccaaattcaggattggttcagtggcagcaatgaagttgccatttaaatttgttcatagcctacatcaccaaggtctctgtgtcaaacctgtggccactctatatgcactttgtttactctttatacaaataaatatactaaagactttacatgca

SEQ ID NO: 2235 - DNA, 6728 bp, Homo sapiens
ggctcggaggcccctcttttcggcagctgggagggcagcggggcggaccgacgggatctcgcgagattctcgcgcggtaggccctgaggacccagcatggcggactcgggactgctgctaaagcggggttcctgccgttccacttggctgcgggtccgcaaggcccggccccagctcatcctcagccgccggccccgccgccggctcgggagcctgcgctggtgcggtcggcggcgcctacggcggcggttactgcaagcccaggcggccggcgtggactggagggagggagcccgccaggtgtcgcgcgcggcggcggcccggagacccaacaccgcgacccccagcccgatccctagcccgaccccggcctccgaacccgagtccgaacccgaactcgaatccgcctcgagttgccaccggcctctcctcatcccaccggtgcggcccgtgggccccggccgcgcgttgctgctgctgccggtcgagcagggttttacttttagtgggatctgtcgtgtgacttgcctctatggccaggtgcaggtatttggttttaccatcagccaaggccagcctgcccaagacatcttctctgtgtatacccactcttgcttgagtatccatgcacttcactactcacagcctgagaaaagcaagaaggaactgaaaagggaagcccggaatttgctcaaatctcatcttaaccttgatgacaggcgttggtcgatgcagaatttttctcctcagtgttccattgtgttgctagaacatctgaaaactgccactgtaaacttcataaccagctatccgggttcatcctacatttttgtgcaagagagtccaactccccagattaaacctgaatatttagccttgaggtctgttggcatcagaagagagaaaaaaaggaaaggccttcagttaactgagagtaccctttcagccctggaagagttagtcaatgtttcctgtgaagaagtagatggctgccctgtcattctagtttgtggatcccaggatgttggaaagtcaacatttaatagatacctgattaaccatttgttaaatagtcttccctgcgttgactatttggaatgtgatctgggacagacagaatttacccctcctggttgcatttctttgcttaatattacagaaccagttctgggaccacctttcactcacctgaggactccacagaagatggtatattatgggaaaccttcttgtaaaaacaactatgagaattatattgacatagtgaaatatgtgttcagcgcttacaagagagagtcccctctcatcgtcaacactatgggatgggtttcagaccaggggctcctgcttctcattgatctgatccgattgctgtctcccagccacgtggttcagttccgctctgaccacagtaaatatatgccagaccttaccccgcagtatgtagatgacatggatggcttgtacacaaaaagcaagaccaagatgagaaatcgacgtttcagactcgcagcatttgcagatgctttggaatttgctgatgaagaaaaagagagtccagttgagttcactggacataaactgataggtgtttatacagactttgcattcagaataactccaagaaatagagagtcacataacaaaattcttcgagatctgtccatcttgagttaccttagccagctgcagcccccgatgcccaaaccactttctcctttacatagcctgacaccctatcaggtccctttcaatgcagtcgcactccggattacccactctgatgtcgcccctacccatatactatatgctgtaaacgccagctgggttggtctttgcaagatccaggatgacgtcagaggatacacgaatgggcccatcctgcttgcccagactccaatctgtgactgcttgggctttggcatctgtagaggcattgacatggagaagcggctgtaccacatcctcacccctgtgcccccggaagagctaaggaccgtgaattgtctgctcgttggagctattgccattccacattgtgtccttaagtgccagcgtgggatcgaagggacagtaccttatgtcacaacggattacaattttaaacttcctggagcatcagagaaaattggagcaagagaacctgaggaggcacataaagagaaaccataccgaagacctaagttctgtcgaaaaatgaagtgatgctcgcgtttttaataagggaagaaactttcctaccagaaagctttgtctcaagcctgaccacaagagacatgatggagtttcatggccatgaatggtgcccttattagcaacagtgttttttgtgtaattcgtgaatgtcatatagtagtcttaagtttctcttttaaagctgcatgagctagaatttgttctagtcttctgtgtgatactcatacttgctgtccagagggagtaaaacagcagagaacagtttgtgtgccattaaaacagagattcctcagaaagttcttcagggacctggttattagaatcaggataaaaataaggaaactggggccattacaatgtaccgagaaggaaggaagaaggccgacctgcaggatctcaagcataatggatacaagggctcgccacgggccttgcctgagccatgtgcagagctggggtccagcggtctgcttccttggagccagtgtggatggttacagcccatccatttggtgcagttgtacttggtctgttatattcaatcaaggtttaatagatagggctgggcatggtggctcatgcacacctgtaatcctagcactttgggaggctgaggcgggaggattgcttgagcctcggagttccaggctggagtacaccaactactccagcctgagcgacagagtaagaccttatcttttaaaaaagaaaagaaaaatttaaacgggtttgatagatataaatttggacccaagagcccttccttttttttaatcctgaggttttatgctgaggaaatttctttcaaatctggaaaacctcggggccaggcgcagtggctcacgcctgtaattccagcactttgggaggccaaggcaggcggttcacgaggtcaggagattgagaccatcctggctaacacagtgaaactccgtctctactaaaaatacaaaaaactagctgggcgtggtggtgggcgcctatagtcccagctactcaggaggctgaggcaggagaatggcatgaacccaggaggcggagcttgcagtgagccgaggtcacgccactgcactccagcctgggcaacaagagcaagactccatctcaaaaaaaaaaaataataatctggaaaacctcttctgggggctcttataaaagtagatttgtccaaattgacttctgatctgaggccagagacaaccacagggcagagctggagactgggctgttttgaaggaagaaggactggcagaccagctcttgggaaagctccattattgcctgtgggaggctggacctgaacttgcacctatgaacaaccctgccatttagagctttttcctgggggtgccggcggctggtgaccagactgccattctccacgttctccctggtgcttccgactctgtcctctaggttggaagtggtttgtgtaaacgggtgatgggaccaggtcacatcatttctgcatttaagacagcaggatacttcctggggctgaggttcaaactggtattgtgaccaccgctttgacagaattccatcttcccagcatgatcacattgtaagactattaggatgtgtgggttttaacacttatatacacttatacaactgttggttatcattgtctttagtattttacagtggcccctcagcacctcttagacccaacagcaaaggacttaaaataagcacaggaaaccttgctatggtgattagttttgatacctttgagacaattgagtctagcttcttagttgccccttatttatgttgaaatctggctcattcatatgatgttttactgtgctggccttgtaaagaattttaagacaatccatcaccatcaatgttttgcctttctccactttcgtgtatcttacagttatactcactggaggtcatttgcagcaaggctctggaagaatgaaactggtgccctgtaattgcatttgcattcaatctaggtttgccttcaggctttaaatgcggcctgtatgaaggtcaagtctttttcttcagtccctatcagtaaagaaaaatcgttgcctctagagggagctatcagctgtgggtcaggtggccgtactggggctagagttggcccaggaagctgtacagggtttagggaaggaggttcggagacagggagccaaggcctctgtcaggtctagcttgtgccggtcagacctgcagcagcaccattctccaggatgacaattcatcccattattgatggcagtggcctttttatccttttttttttttttttttttttttgagatggagtttcgctcttgttgcccaggctggagtgcagtggcgcaatctgggctcactgccacctccgcctcccgggttcaagtgattctcttgcctcaacctcccgagtagctgggattacaggcatgcgccaccatgcctggctgattttctatttttagtagagaaggggtttcaccatgttggccaggctggttttgaactcctgtcctcaggtgatccacctgccttggcctcccaaagtgttgggattacaggcatgagccaccgcacccggctggtggcagtggctttaagggcatttagaagaaggacaagattggactttttatcatttccacagtctgttatgggtcagattaggtagtaaggagttctccattggagctattcttttttttttttctttttttttgagacagagtctcgctctgtcacccaggctggggtgcagtggcacgaccttggctcactacagcctctcccctcccgggttcaagtgattcttctgccccagcctcccaagtagctgggattacaggtgagcgccaccatgcctggctaatttttatatttttagtagagatagggtttcaccgtattggctaggctggtctcgatctcctgaccttgtgatccgcttgcctcggcctcccaaagtgctgaagcaatttcttttttttttttttttttgagacagagtctagctctgtcgcccaggctggggtgcagtggagtgatctcggctcactgcaacttccgcctcccaggtttaagcgattctcctgcctcagcctcctgagtagctgggattacaggcgtatgccaccacgcccagctaatttttgtatttttagtagagacagggtttcaccatgttggtcaggctggtctcgaactcctgacctcgtgatccgcccgccttggcctccgaaagtgctgggattacaggcgtgagccactgcgcctggcctgaagctattctttacaaaagctcttagtttttgtttgtttgtttgtttttttcttttgcgacggactctctgtcgccaaggctggagtgcagtggcctgatctcaggtcactgcaacctctgcctcctgggttcaagcgattctcctgcttcagcctcccaagtagctgggattacaggcgcctgccaccacacccagctaatttttgtatttttagtagagatggcgtttcactttattggtcaggctggtctcgaacttccaacctcaggggatccgcctgccttggcctcccaaggtgttgggattacaggcataagacactgtgcctgggcctcttagtaatttttgtatgtaattttcaaagtatccgggattacaggcgcccgccactacactagctaattttttttgtatttttagtagagatggggttttactatgttggctaggctggtctcgagctcctgacctcgtgatccgtccaccttggcctcccaaagtgctgggattacaggcgtgagccaccgcgcccggcctaggtcatttgtttttgggtttggatggcaagatcatggataagacagcaggctttgattatagagctctgagttcaaatcctggctctaccacttgtcagtggtgtaacttggaggaagatgcttagcctgagcctgttttatgttttgaagattgggtaattgtccttccttcagtgttcctgggtgaggagtaagtgaagtcatgtctataagagatgtagcacagtctccggcatgtagaaacggtcagtaactcctagtgtgtagctagcctctgatgagatggtaaactcaggaggctggcaccacggctgtgctactcacggtcatgctggagggatgcagaaactaaatgaatccacagctacttactcatcttgcctctggcaggttcaccttaaaattgttgctaccaagcttcctgtggtcaaagagcccttgaggaagcaagctccacggccaccatagataacccattcctgaaagtttttcataaacccccacttgttgcttttaaaattttataagcagcttacacatgtagaaaatgatcctccagcccaccaccacatagtaatcactgacactgtgaggtgtctcagctggggttctgctgtgtgtgtgtgtattttacaaaatatgtatggtttctgttcagctcttttcagttaacagatgaacttttgtatcattaaatatttttgaaaacatgaaaaaaaaaaaaaaaaaa

SEQ ID NO: 2236 - DNA, 3801 bp, Homo sapiens
gcggccgcgggaggagggcgcccaaggcggcgggggaggttaaggctggcctgccactcctcctgctatgatgcctgggcagatcccggacccttcggtgaccacaggctccctgccagggcttggccccctgaccgggctccccagctcggccctgactgtggaggagctgaaatacgctgacatccgcaacctcggggccatgattgcacccttgcacttcctggaggtgaaactgggcaagaggccccagcccgtgaaaagtgagctagatgaggaagaggagcgaaggaaaaggcgccgggagaagaacaaagtcgcagcagcccgatgccggaacaagaagaaggagcgcacggagtttctgcagcgggaatccgagcggctggaactcatgaacgcagagctgaagacccagattgaggagctgaagcaggagcggcagcagctcatcctgatgctgaaccgacaccgccccacctgcatcgtccggaccgacagtgtcaagacccccgagtcagaaggcaacccactgctcgagcagctcgagaagaagtgaccatgggctgggaggaggtggaggaggaggaagaggagaaggaaaagtgacgaagagagaggaggaggggggccccagatggcccttcctttggtgcatgaaaaactgtacaatgaggttcagcacagccagcatcagccgagcttttttgtgaaactcagatcagccacccaggaggaagagcgggctgaggaaacccagagggaccaagcgctgagaccaaagttgaccctcgggtagggttgtcctgcctggggccccacttgaaggaggcaggacagaggcaccgaggccagggagacgcccaacgaggcagccctgggctcttctctggcctcttcaccagggcacccatccaaggaacctccgaacagccaggaaaagccatgagttgcaaccaaaacgcggctgaggatggaactcagaatgaaactgcaacccacctgcccccagccctgcccctcgccctgatgcgaagctggagaggggcgtgctgcggggccctgatgcccccacccacctcggtccagcgcggccctgcccaggaggcggcagccgggcgcaccctcgccagccctgctggagtttgctgtgggcactgaggcgcgggcgcccttccaaagcacatactcaccgaatgtttacagactggctgtcctggcagggctttcaactgcacatgttttttatactttcctttttttttttttttttaatattttttacaaaaaaaaagattttatacaagcaatatatatatggatttctataatcactcgatgtgatacagtataaatatgctatggtttgtttgttatgaacagatagccaccagttacggccgttgtgtgtaactcctaagtactgtagtctctgggtgtcgggggtggccagggcgggggcggggtgcatttccatccttgtaaacccttcatagtactcagtcctgtatcgctcagtaaacattgctcttacttacatagccgccttgcgtggtgtctgcctggggaatgggtgcaaggccctctcagggtcggagactgtttggagcctctgctataggcctgttcattttcacaacagctctcctatttcacagatgaggaagctaaggctcagagacattaagccacctgcagttactattttgagagcagtcagagtgttcgctcactctgcagatgttttctgagggcctgttgtgtgtgccaggccctgagaattcactggaggatgaaacagacctaagtcttgcccttgtggggcctccagtaaggagtgaatcctgtgcttgctccataagttgtctcatttcgtcttcatggcagccttgccagggaacagcacttgtccccaattcacagatggcgaattagaggtccagggaattaaactcgcagacaccatttgttgaagacttattttgtgacaagcagacatagtctcttcccttctcacaagagcacaaactaggcacgattcttctcattttacagatggtttaactgaggctcagagaaggtaagcgacttatccaaggtaacccagctagcaagggatagagctggtgtttgaactctccctccagaggcctgtgactctcctcctgtcaccaacccactatgattgtcctcatggttgaataggaagcttatgaggccacagttatagatttagtttctgggaaggctggatagagttccaggttgtcccatgatcacagagtgaaccaactaccctggtcaatgtgtgtctgacccagggaagggtgtggatggcttctctgccccctcacctcgacagctgaatccctgccacccagggccggagcagctcagtggcattcactcagtgcctgctgtgtacctggcactcggcagttctcaaggcatgtcacgcatgaggaaggcgggagaggtgtttttagcttccttgtatactgaagcttgcaaaggctacagtttacccaactaaacttgactcctgcattctaatcatgtgttctttctcctccatccctggacttaggataactagttgctggtgatgacttcgtgtcaagaacagcagtgaacctgggttgcttcccaaattgtggacgaggccttctgggatgggcagaagtggagaatggtgattaacacacctgtgatccctccctcgctcactcctctcagtttccctccacccaacacacttggtgtggactcccctgcaccccgccctagaaacaggacctggtcctctcactgtcagctgtggcagaaggttgtggcagcgggttgccttctgtctcgggggtcttgaggctgtcggtccggacgatgcaggtgaggcagtgtcagttctgcatcaggaacccctcgcgctgtaatcctttgatatttttcaagccatgagaaaaatgaagtggacttaccagggtccctccagtgacctagtggatgttcttacaggactgccgtgtgccactggctgtggcttccctggtcctgtgcttggccaccgggagctggcatctccaaaatagagcctccttagcctgtgcaggtgggctgtcttccaaagtcaccacaccagtgacttgtgctgtgcggagccttcctcaccaggaccactggctgctcctgtggctagaagtcacaattataggcttcattgcaagagccagcatttgagtttcttctgggcacctgccactgtgcatgtgtgacctcaactgctttgtgcaccctgactggggggtaggtgctagcgttccaacattacagatgagaaaaccgaggcacacagaagaggtaacctgcccaaggtcacaggtgttaggtggcagagccaagatgttattgtcagtctgacttcaggtgcataaaacctgaggctgagcctccccatgagaggaaaaatgtgtttgtggtgtgacctcagttgccagggaacttgtgcaggaagccgggagagatggcacagacccacctgtgctcacagtacatgttaagaattcccaagtctcaggcaaaccatctccaagggtgttcacagaagacacaccttaaaggcaaacgggttcatgatgtaatcttctattgactagctgtgaacctcatttttcttatctgtgaagtgggaacagtaataatccaagtctttttatggagttatcaagatcaaaaaaggaatggatatacaaagtgttttgtgaaataaaagctccctaaaatggtaaaaaaaaaaaaaaaaaa

SEQ ID NO: 2237 - DNA, 1223 bp, Homo sapiens
cggcggatttggagggaccctacgaaccaggagtcaggcgagccgatctggggctgcaggatgttccgctgggagcgctccattcccctgcgaggctcggccgccgccctgtgcaacaacctcagtgtgctgcagctgccggctcgcaacctcacgtattttggcgtggttcatggaccaagcgcccagcttctcagcgctgctcctgagggtgtgcccttggcccagcgccagctccacgctaaggagggtgctggagtgagtcccccacttatcactcaggtccactggtgtgtcctccccttccgagtgctgctggtactcacctcacatcgaggaatacagatgtacgagtccaatggctacaccatggtctactggcatgcactggactctggagatgcctccccagtacaggctgtgtttgcccggggaattgctgccagtggccacttcatctgtgtgggaacgtggtcaggccgggtgctggtgtttgacatcccagcaaagggtcccaacattgtactgagcgaggagctggctgggcaccagatgccaatcacagacattgccaccgagcctgcccagggacaggattgtgtggctgacatggtgacggcagatgactcaggcttgctgtgtgtctggcggtcagggccagaattcacattattgacccgcattccaggatttggagttccgtgcccctctgtgcagctgtggcaggggatcatagcagcaggctatgggaacggacaagtgcatctatatgaggccactacaggaaatctacatgtccagatcaatgcccatgcccgggccatctgcgccctggacctggcttctgaggtgggcaagctactctctgcaggtgaggacacctttgtgcatatctggaagctgagcagaaacccagagagtggctacattgaggtggaacactgtcatggtgagtgtgtcgccgacacccagctgtgtggtgctcgattttgtgattcctcaggcaactcctttgctgtgactggctatgaccttgcggagatccggagattcagcagtgtgtgagaagagcagccttcctttgtccctgtggtattcataaagtacccgctccacccaaaaaaaaaaaaaaaaaaaaaaaaaaaaaaaaaaaaaaaaaaaaaaaaaaaaaaaaaaaaaaaaaaaaaaaaaaaaaaaaaaaaaaaaaaaaaaaaaaaaaaaaa

SEQ ID NO: 2238 - DNA, 1044 bp, Homo sapiens
gcccttcccgcctctggggaagggaacttccgcttcggaccgagggcagtaggctctcggctcctggtcccactgctgctcagcccagtggcctcacaggacaccagcttcccaggaggcgtctgacacagtatgatgatgaagatcccatggggcagcatcccagtactgatgttgctcctgctcctgggcctaatcgatatctcccaggcccagctcagctgcaccgggcccccagccatccctggcatcccgggtatccctgggacacctggccccgatggccaacctgggaccccagggataaaaggagagaaagggcttccagggctggctggagaccatggtgagttcggagagaagggagacccagggattcctgggaatccaggaaaagtcggccccaagggccccatgggccctaaaggtggcccaggggcccctggagccccaggccccaaaggtgaatcgggagactacaaggccacccagaaaatcgccttctctgccacaagaaccatcaacgtccccctgcgccgggaccagaccatccgcttcgaccacgtgatcaccaacatgaacaacaattatgagccccgcagtggcaagttcacctgcaaggtgcccggtctctactacttcacctaccacgccagctctcgagggaacctgtgcgtgaacctcatgcgtggccgggagcgtgcacagaaggtggtcaccttctgtgactatgcctacaacaccttccaggtcaccaccggtggcatggtcctcaagctggagcagggggagaacgtcttcctgcaggccaccgacaagaactcactactgggcatggagggtgccaacagcatcttttccgggttcctgctctttccagatatggaggcctgacctgtgggctgcttcacatccaccccggctccccctgccagcaacgctcactctacccccaacaccaccccttgcccaaccaatgcacacagtagggcttggtgaatgctgctgagtgaatgagtaaataaactcttcaaggccaaggga

SEQ ID NO: 2239 - DNA, 384 bp, Homo sapiens
atggcctggacccctctctggctcactctcctcactctttgcataggttctgcggtttcttctgagctgactcaggaccctgctgtgtctgtggccttgggacagacagtcaggatcacatgccaaggaaacagtatcagagacaattatgcaaactggtatcagcagaagccaggacaggcccctgaagttgtcatctatggtaaaaacaaccggccctcagggatcccagaccgattctctggctccaggtcaggaaacacagcgtccttgaccatcactggggctcaggcggaagatgaggctgactattactgtaactcccgggacaccagtggtaaccattatgtcttcggaactgggaccaaggtcaccgtcctgggt

SEQ ID NO: 2240 - DNA, 513 bp, Homo sapiens
aaaagcaacttaagaaacataaacgatacttctcaattttgtggtactttttcatttttaaaacagctaatgaggaatgtttcatgcttaagtatattggtctatctctagatcgaacttcacatttacaaacatggcttttaggagttcccacatatgtttgggaagtggagtgggcaaaatcctggagaagacagaattgttgaaagcggggctgataccccagaatgtgcctaatatactagaccataggtgccacagagagctggagagggagtgggcatcaacatgtatgtgtactttgccaggctttcgtccacatctgatatttactaattcaacactatttcctgaaaatctggtttgtgttctgtctctgggaagcactaaggaaataatggcgggcccaacactctcgtgaaagttctcagggagtgtttgcagagagacaggtatttaacaaacaatgaaatgactatgtaattaagtgatttgaaaaaaaagtacagagtc

SEQ ID NO: 2241 - DNA, 1198 bp, Homo sapiens
ggtggagcaccatggaaggcgactgtctgagctgcatgaagtatctgatgtttgtattcaatttcttcatatttctgggcggggcctgcctgctggccatcggcatctgggtcatggtggaccccaccggcttccgggagatcgtggctgccaatcctctgctcctcacgggcgcctacatcctcctggccatggggggcctgctctttctgctcggcttcctgggctgctgcggggccgtccgtgagaacaagtgtctgctgctatttttcttcctgttcatcctgatcatcttcctggcagagctctcagcagccatcctggccttcatcttcagggaaaatctcacccgagaattcttcaccaaggagctcaccaagcactaccagggcaataacgacacagacgtcttctctgccacctggaactcggtcatgatcacatttggttgctgcggggtcaacgggcctgaagactttaagtttgcatctgtgtttcgactcctgaccctggatagtgaagaggtgccggaggcctgctgccggagggaaccccaaagtcgggacggggtcctgctgagccgggaggagtgcctcctgggaaggagcctattcctaaacaagcagggctgttacacggtgatcctcaacaccttcgagacctacgtctacttggccggagcccttgccatcggggtactggccatcgaggaagaaagagctcattctgtctcacaagccaccggcatcctgtatcagcttccagcctcccctcaggctttccagtcaccagggacactcggagccacagcctagagccccgtgttccctggcctgtgcgtctgcccccttctgagatgcagccagaagctctgtgcctgctgcaaagattcaggtggaccctcctctaatctcctcctgctgtgcccgccagtccttgccctcccaccaggtctctgagctcagtcttaccaaattcgccctttaacagcttgctctggcaaccccataaatgacacctgagctccgtagaagctaagctcctgagacccagggggacctgccactggtaccgcggcccagcctggggcctgggggctgcccctcttgaaccacccacatgcttagccccagctttttggaagaggcaaatggctggtctgaggatgacacacaaaaacaaaaaaaaaaaaaaaaaa

SEQ ID NO: 2242 - DNA, 570 bp, Homo sapiens
tcagtttcttcttcctgcagctggttgagttctttccagacaaagacaagtgacaagaattagaggtttaaaaagcaaccagattcatctcagcagcttttgtagttttaaataagcaaggagtttctccagcgaaacttcctcacacctcttggtcttggtctcttcagacactttccttcctgttctctggagatcttgcagaaaagagcctgcagtgtttcccttgctcagccatgctcctggagcttatcccactgctggggatacattttgtcctgagaactgccagagcccagtcagtgacccagcctgacatccacatcactgtctctgaaggagcctcactggagttgagatgtaactattcctatggggcaacaccttatctcttctggtatgtccagtcccccggccaaggcctccagctgctcctgaagtacttttcaggagacactctggttcaaggcattaaaggctttgaggctgaatttaagaggagtcaatcttccttcaacctgaggaaaccctctgtgcattggagtgatgctgctgagtacttctgtgctg

SEQ ID NO: 2243 - DNA, 2258 bp, Homo sapiens
acagcgccctgcagcgcaggcgacggaaggttgcagaggcagtggggcgccgaccaagtggaagctgagccaccacctcccactccccgcgccgccccccagaaggacgcactgctctgattggcccggaagggttcaggagctgcccagcctttgggctcggggccaaaggccgcaccttcccccagcggccccgggcgaccagcgcgctccggccttgccgccgccacctcgcggagaagccagccatgggcgccgccggctcctccgcgctggcgcgctttgtcctcctcgcgcaatcccggcccgggtggctcggggttgccgcgctgggcctgaccgcggtggcgctgggggctgtcgcctggcgccgcgcatggcccacgcggcgccggcggctgctgcagcaggtgggcacagtggcgcagctctggatctaccctgtgaaatcctgcaagggggtgccggtgagcgaggcggagtgcacggccatggggctgcgcagcggcaacctgcgggacaggttttggcttgtgatcaaccaggagggaaacatggttactgctcgccaggaacctcgcctggtcctgatttccctgacctgcgatggtgacaccctgactctcagtgcagcctacacaaaggacctactactgcctatcaaaacgcccaccacaaatgcagtgcacaagtgcagagtgcacggcctggagatagagggcagggactgtggcgaggccaccgcccagtggataaccagcttcctgaagtcacagccctaccgcctggtgcacttcgagcctcacatgcgaccgagacgtcctcatcaaatagcagacttgttccgacccaaggaccagattgcttactcagacaccagcccattcttgatcctttctgaggcgtcgctggcggatctcaactccaggctagagaagaaagttaaagcaaccaacttcaggcccaatattgtaatttcaggatgcgatgtctatgcagaggattcttgggatgagcttcttattggtgacgtggaactgaaaagggtgatggcttgttccagatgcattttaaccacagtggacccagacaccggtgtcatgagcaggaaggaaccgctggaaacactgaagagttatcgccagtgtgacccttcagaacgaaagttatatggaaaatcaccactctttgggcagtattttgtgctggaaaacccagggaccatcaaagtgggagaccctgtgtacctgctgggccagtaatgggaaccgtatgtcctggaatattagatgccttttaaaaatgttctcaaaaatgacaacacttgaagcatggtgtttcagaactgagacctctacattttctttaaatttgtgattttcacatttttcgtcttttggacttctggtgtctcaatgcttcaatgtcccagtgcaaaaagtaaagaaatatagtctcaataacttagtaggacttcagtaagtcacttaaatgacaagacaggattctgaaaactccccgtttaactgattatggaatagttctttctcctgcttctccgtttatctaccaagagcgcagacttgcatcctgtcactaccactcgttagagaaagagaagaagagaaagaggaagagtgggtgggctggaagaatatcctagaatgtgttattgcccctgttcatgaggtacgcaatgaaaattaaattgcaccccaaatatggctggaatgccacttcccttttcttctcaagccccgggctagcttttgaaatggcataaagactgaggtgaccttcaggaagcactgcagatattaattttccatagatctggatctggccctgctgcttctcagacagcattggatttcctaaaggtgctcaggaggatggttgtgtagtcatggaggacccctggatccttgccattcccctcagctaatgacggagtgctccttctccagttccgggtgaaaaagttctgaattctgtggaggagaagaaaagtgattcagtgatttcagatagactactgaaaacctttaaagggggaaaaggaaagcatatgtcagttgtttaaaacccaatatctattttttaactgattgtataactctaagatctgatgaagtatattttttattgccattttgtcctttgattatattgggaagttgactaaacttgaaaaatgtttttaaaactgtgaataaatggaagctactttgactagtttcagaaaaaaaaaaaaaaaa

SEQ ID NO: 2244 - DNA, 3300 bp, Homo sapiens
atggcagtagccccgcgactgtttggggggctctgcttccgtttccgggaccagaatccggaagtggctgttgaggggcgtcttccaatctcgcacagctgcgttggctgtagaagagaacggacggcgatggcgacggtcgcagcaaatccagctgctgctgcggcggctgtggcggcggcagcggcggtgactgaggatagagagccacagcacgaggagctgccaggcctggacagccagtggcgccagatagaaaacggcgagagtgggcgagaacgtccactgcgggccggcgaaagctggttccttgtggagaagcactggtataagcagtgggaggcatacgtgcagggaggggaccaggactccagcaccttccctggctgcatcaacaatgccacactctttcaagatgagataaactggcgcctcaaggagggactggtggaaggcgaggattatgtgctgctcccagcagctgcttggcattacctggtcagctggtatggtctagagcatggccagccacccattgaacgcaaggtcatagagctgcccaacatccagaaggtcgaagtgtacccagtagaactgctgcttgtccggcacaatgatttgggcaaatctcacactgttcagttcagccataccgattctattggcctagtattgcgcacagctcgggagcggtttctggtggagccccaggaagacactcggctttgggccaagaactcagaaggctctttggataggttgtatgacacacacatcacggttctcgatgcggcccttgagactgggcagttgatcatcatggagacccgcaagaaagatggcacttggcccagcgcacagctgcatgtcatgaacaacaacatgtcggaagaggatgaggacttcaagggtcagccaggcatctgtggcctcaccaatctgggcaacacgtgcttcatgaactcggccctgcagtgcctcagcaatgtgccacagctcaccgagtacttcctcaacaactgctacctggaggagctcaacttccgcaacccactgggcatgaagggtgagatcgcagaggcctatgcagacctggtgaagcaggcgtggtctggccaccaccgctccattgtgccacatgtgttcaagaacaaggttggccattttgcatcccaatttctgggctaccagcagcatgactctcaggagctgctgtcattcctcctggacgggctgcatgaggaccttaatcgggtgaagaagaaggagtatgtggagctgtgcgatgctgctgggcgaccggatcaggaggtggcacaggaggcatggcaaaaccacaaacggcggaacgattctgtgatcgtggacactttccacggcctcttcaagtccacgctggtgtgccccgattgtggcaatgtatctgtgaccttcgaccccttctgctacctcagtgttccactgcctatcagccacaagagggtcttggaggtcttctttatccccatggatccgcgccgcaagccagagcagcaccggctcgtggtccccaagaaaggcaagatctcggatctatgtgtggctctgtccaaacacacgggcatctcgccagagaggatgatggtggctgatgtcttcagtcaccgcttctataagctctatcagctagaggagcctctgagcagcatcttggaccgtgatgatatcttcgtctatgaggtgtcaggtcgcattgaggccattgagggctcaagagaggacatcgtggttcctgtctacctgcgggagcgcacccctgcccgtgactacaacaactcctactacggcctgatgctttttggacaccccctcctggtatcagtgccccgggaccgcttcacctgggagggcctgtataacgtcctgatgtaccggctctcacgctacgtgaccaaacccaactcagatgatgaggacgatggggatgagaaagaagatgacgaggaggataaagatgacgtccctgggccctcaactgggggcagcctccgagaccctgagccagagcaggctgggcccagctctggagtcacgaacaggtgcccgttcctcctggacaattgccttggcacatctcagtggcccccaaggcgacgacgcaagcagctgttcaccctgcagacggtgaactccaatgggaccagcgaccgcacaacctcccctgaagaagtccatgcccagccgtacattgctatcgactgggagccagagatgaagaagcgttactatgacgaggtagaggctgagggctacgtgaagcatgactgcgtcgggtacgtgatgaagaaggctcccgtgcggctgcaggagtgcattgagctcttcaccactgtggagaccctggagaaggaaaacccctggtactgcccttcctgcaagcagcaccagctggcaaccaagaagctggacctgtggatgctgccggagattctcatcatccacctgaaacgcttttcctacaccaagttctcccgagagaagctggacaccctcgtggagtttcctatccgggacctggacttctctgagtttgtcatccagccacagaatgagtcgaatccggagctgtacaaatatgacctcatcgcggtttccaaccattatgggggcatgcgtgatggacactacacaacatttgcctgcaacaaggacagcggccagtggcactactttgatgacaacagcgtctcccctgtcaatgagaatcagatcgagtccaaggcagcctatgtcctcttctaccaacgccaggacgtggcgcgacgcctgctgtccccggccggctcatctggcgccccagcctcccctgcctgcagctccccacccagctctgagttcatggatgttaattgagagccctgggtcctgccacagaaaaaaaaaaaaaaaagccctctctgcaatctcgcttctcgtgtccgccccgcttctcttattcgtgttaggtgcccccgccaggcattgcaggcttagtcgtggctactgttctcctgtgccgctgcatcgctctctcccgggaaagaacaggtcgtgtctcctcctagcagtgcgcgccccgcctgtgtttgcccttccagcagtgaccctcccttctagtctttatttatggtcgtgcccttccctctcctcagcccagagtgttctgcgtgggtggtgatgggggttcacctgaacacagagtgtattttcttattgaggccctgtaccttctgctgtgtgtgtgtatatataaagcaccagtctgctccccaaaaaaaaaaa

SEQ ID NO: 2245 - DNA, 1359 bp, Homo sapiens
atccttattctatatctcttggtatttagtgtaaaaattttaaaatctttacctagcaatcttgaggaagaaacttgataactgataatacatgagattgttacctaagtgaaatataatcctatatattcaacaaactttagagaaataagataaattttaaagtaaatgacttctgtagttttatagatcctccaaaccaatctagtctcagatctcaccttcatcatttctctcatttccttttggcctaattaatcaaaatccttcctagaatgttcatttctggccagtatgtcttcctgaatatgaataagaaataaaataccatttgatgtttgaaattatgggggtaatctcaatgacggaaatagatgaccaggaaaagggaaacgaatgcctgattcattatattcatgaagatatcaaaggtttataaagccaatatctgggaaagagaaaaccgtgagacttccagatcttctctggtgaagtgtgtttcctgcaacgatcacgaacatgaacatcaaaggatcgccatggaaagggtccctcctgctgctgctggtgtcaaacctgctcctgtgccagagcgtggcccccttgcccatctgtcccggcggggctgcccgatgccaggtgacccttcgagacctgtttgaccgcgccgtcgtcctgtcccactacatccataacctctcctcagaaatgttcagcgaattcgataaacggtatacccatggccgggggttcattaccaaggccatcaacagctgccacacttcttcccttgccacccccgaagacaaggagcaagcccaacagatgaatcaaaaagactttctgagcctgatagtcagcatattgcgatcctggaatgagcctctgtatcatctggtcacggaagtacgtggtatgcaagaagccccggaggctatcctatccaaagctgtagagattgaggagcaaaccaaacggcttctagagggcatggagctgatagtcagccaggttcatcctgaaaccaaagaaaatgagatctaccctgtctggtcgggacttccatccctgcagatggctgatgaagagtctcgcctttctgcttattataacctgctccactgcctacgcagggattcacataaaatcgacaattatctcaagctcctgaagtgccgaatcatccacaacaacaactgctaagcccacatccatttcatctatttctgagaaggtccttaatgatccgttccattgcaagcttcttttagttgtatctcttttgaatccatgcttgggtgtaacaggtctcctcttaaaaaataaaaactgactccttagagacatcaaaatctaaaa

SEQ ID NO: 2246 - DNA, 2586 bp, Homo sapiens
gattggggttttcccctcccatgtgctcaagactggcgctaaaagttttgagcttctcaaaagtctagagccaccgtccagggagcaggtagctgctgggctccggggacactttgcgttcgggctgggagcgtgctttccacgacggtgacacgcttccctggattggcagccagactgccttccgggtcactgccatggaggagccgcagtcagatcctagcgtcgagccccctctgagtcaggaaacattttcagacctatggaaactacttcctgaaaacaacgttctgtcccccttgccgtcccaagcaatggatgatttgatgctgtccccggacgatattgaacaatggttcactgaagacccaggtccagatgaagctcccagaatgccagaggctgctccccccgtggcccctgcaccagcagctcctacaccggcggcccctgcaccagccccctcctggcccctgtcatcttctgtcccttcccagaaaacctaccagggcagctacggtttccgtctgggcttcttgcattctgggacagccaagtctgtgacttgcacgtactcccctgccctcaacaagatgttttgccaactggccaagacctgccctgtgcagctgtgggttgattccacacccccgcccggcacccgcgtccgcgccatggccatctacaagcagtcacagcacatgacggaggttgtgaggcgctgcccccaccatgagcgctgctcagatagcgatggtctggcccctcctcagcatcttatccgagtggaaggaaatttgcgtgtggagtatttggatgacagaaacacttttcgacatagtgtggtggtgccctatgagccgcctgaggttggctctgactgtaccaccatccactacaactacatgtgtaacagttcctgcatgggcggcatgaaccggaggcccatcctcaccatcatcacactggaagactccagtggtaatctactgggacggaacagctttgaggtgcgtgtttgtgcctgtcctgggagagaccggcgcacagaggaagagaatctccgcaagaaaggggagcctcaccacgagctgcccccagggagcactaagcgagcactgcccaacaacaccagctcctctccccagccaaagaagaaaccactggatggagaatatttcacccttcagatccgtgggcgtgagcgcttcgagatgttccgagagctgaatgaggccttggaactcaaggatgcccaggctgggaaggagccaggggggagcagggctcactccagccacctgaagtccaaaaagggtcagtctacctcccgccataaaaaactcatgttcaagacagaagggcctgactcagactgacattctccacttcttgttccccactgacagcctcccacccccatctctccctcccctgccattttgggttttgggtctttgaacccttgcttgcaataggtgtgcgtcagaagcacccaggacttccatttgctttgtcccggggctccactgaacaagttggcctgcactggtgttttgttgtggggaggaggatggggagtaggacataccagcttagattttaaggtttttactgtgagggatgtttgggagatgtaagaaatgttcttgcagttaagggttagtttacaatcagccacattctaggtaggggcccacttcaccgtactaaccagggaagctgtccctcactgttgaattttctctaacttcaaggcccatatctgtgaaatgctggcatttgcacctacctcacagagtgcattgtgagggttaatgaaataatgtacatctggccttgaaaccaccttttattacatggggtctagaacttgacccccttgagggtgcttgttccctctccctgttggtcggtgggttggtagtttctacagttgggcagctggttaggtagagggagttgtcaagtctctgctggcccagccaaaccctgtctgacaacctcttggtgaaccttagtacctaaaaggaaatctcaccccatcccacaccctggaggatttcatctcttgtatatgatgatctggatccaccaagacttgttttatgctcagggtcaatttcttttttcttttttttttttttttttctttttctttgagactgggtctcgctttgttgcccaggctggagtggagtggcgtgatcttggcttactgcagcctttgcctccccggctcgagcagtcctgcctcagcctccggagtagctgggaccacaggttcatgccaccatggccagccaacttttgcatgttttgtagagatggggtctcacagtgttgcccaggctggtctcaaactcctgggctcaggcgatccacctgtctcagcctcccagagtgctgggattacaattgtgagccaccacgtccagctggaagggtcaacatcttttacattctgcaagcacatctgcattttcaccccacccttcccctccttctccctttttatatcccatttttatatcgatctcttattttacaataaaactttgctgccacctgtgtgtctgaggggtg

SEQ ID NO: 2247 - DNA, 2354 bp, Homo sapiens; identical to SEQ ID NO: 2037

SEQ ID NO: 2248 - DNA, 3050 bp, Homo sapiens
tttttttgcttctgccccagatctttcctggacagtgcgtctcagcagttcagatccgggggcccccagctgacagagggcgtggggggttaaggcattaacccctcccagcctcttcctgaagaaaccacccagccttggcgcggcgctgggtgacttcgcgtagcaggcagggaactggccgcggcgagcgggactggccattggagtgctccgctgcggagggaggggaccccgactcgagtaagtttgcgagagcactacgcagtcagtcgggggcagcagcaagatgcgaagcgagccgtacagatcccgggctctccgaacgcaacttcgccctgcttgagcgaggctgcggtttccgaggccctctccagccaaggaaaagctacacaaaaagcctggatcactcatcgaaccacccctgaagccagtgaaggctctctcgcctcgccctctagcgttcgtctggagtagcgccaccccggcttcctggggacacagggttggcaccatggggcccaccagcgtcccgctggtcaaggcccaccgcagctcggtctctgactacgtcaactatgatatcatcgtccggcattacaactacacgggaaagctgaatatcagcgcggacaaggagaacagcattaaactgacctcggtggtgttcattctcatctgctgctttatcatcctggagaacatctttgtcttgctgaccatttggaaaaccaagaaattccaccgacccatgtactattttattggcaatctggccctctcagacctgttggcaggagtagcctacacagctaacctgctcttgtctggggccaccacctacaagctcactcccgcccagtggtttctgcgggaagggagtatgtttgtggccctgtcagcctccgtgttcagtctcctcgccatcgccattgagcgctatatcacaatgctgaaaatgaaactccacaacgggagcaataacttccgcctcttcctgctaatcagcgcctgctgggtcatctccctcatcctgggtggcctgcctatcatgggctggaactgcatcagtgcgctgtccagctgctccaccgtgctgccgctctaccacaagcactatatcctcttctgcaccacggtcttcactctgcttctgctctccatcgtcattctgtactgcagaatctactccttggtcaggactcggagccgccgcctgacgttccgcaagaacatttccaaggccagccgcagctctgagaagtcgctggcgctgctcaagaccgtaattatcgtcctgagcgtcttcatcgcctgctgggcaccgctcttcatcctgctcctgctggatgtgggctgcaaggtgaagacctgtgacatcctcttcagagcggagtacttcctggtgttagctgtgctcaactccggcaccaaccccatcatttacactctgaccaacaaggagatgcgtcgggccttcatccggatcatgtcctgctgcaagtgcccgagcggagactctgctggcaaattcaagcgacccatcatcgccggcatggaattcagccgcagcaaatcggacaattcctcccacccccagaaagacgaaggggacaacccagagaccattatgtcttctggaaacgtcaactcttcttcctagaactggaagctgtccacccaccggaagcgctctttacttggtcgctggccaccccagtgtttggaaaaaaatctctgggcttcgactgctgccagggaggagctgctgcaagccagagggaggaagggggagaatacgaacagcctggtggtgtcgggtgttggtgggtagagttagttcctgtgaacaatgcactgggaagggtggagatcaggtcccggcctggaatatattttctacccccctggagctttgattttgcactgagccaaaggtctagcattgtcaagctcctaaagggttcatttggcccctcctcaaagactaatgtccccatgtgaaagcgtctctttgtctggagctttgaggagatgttttccttcactttagtttcaaacccaagtgagtgtgtgcacttctgcttctttagggatgccctgtacatcccacaccccaccctcccttcccttcatacccctcctcaacgttcttttactttatactttaactacctgagagttatcagagctggggttgtggaatgatcgatcatctatagcaaataggctatgttgagtacgtaggctgtgggaagatgaagatggtttggaggtgtaaaacaatgtccttcgctgaggccaaagtttccatgtaagcgggatccgttttttggaatttggttgaagtcactttgatttctttaaaaaacatcttttcaatgaaatgtgttaccatttcatatccattgaagccgaaatctgcataaggaagcccactttatctaaatgatattagccaggatccttggtgtcctaggagaaacagacaagcaaaacaaagtgaaaaccgaatggattaacttttgcaaaccaagggagatttcttagcaaatgagtctaacaaatatgacatctgtctttggcacttttgttgatgtttatttcagaatgttgtgtgattcatttcaagcaacaacatggttgtattttgttgtgttaaaagtacttttcttgatttttgaatgtatttgtttcagcagaagtcattttattggatttttctaacccgtgttaacaccattgaatgtgtatttcttaagaaaataccaccctcttgtgcccttaaaagcattactttaactggtagggaacgccagaaacttttcagtccagctattcattagatagtaattgaagatatgtataaatattacaaagaataaaaatatattactgtctctttagtatggttttcagtgcaattaaaccgagagatgtcttgtttttttaaaaagaatagtatttaataggtttctgacttttgtggatcattttgcacatagctttatcaacttttaaacattaataaactgatttttttaaagatc

SEQ ID NO: 2249 - DNA, 4548 bp, Homo sapiens
cggaagtagcgtcggcgcgggagctgagcggagtggccttgccaccggaggggaagggctgctggcgttaggcctggctgggtcgtgcggctgagcgtgaggctagaaagaaaaagcgatcctccaagagtgagaacgggagatctgccgaggataacaacctcccttgtggccgaagggcgggggatccccacacgagggctccgcttcgagagacggcgacaaaggaaagttcgtagcgcgttccggaggcccggccacctctgagaagggagacgacgctgctgggtccgctgagcggggcgacccgagcttatatagaattggtgataggatcacaacttctgaggtcccagcaagagtcctaacatctagcagctctaccaccaggacaggccccctaaaactaattccaacaagcacctctgaagtcttctcattcacaggttaaggctacctttccagataatccaacagctaaatcaccagtttccaagggcatttgcatcacctatggaaagcatcggatccttatacaccagatgttcttgacagctcatcccgtcattcccccctgcacaaaagttgctataccagcggacaagcaagacaactactgagcttcttttgattgtcaagtagatataatatcactgccagcaaaacagcacaaaaagtgtctcttcacagtatcactaccagttgggactatgctaagtaaatcagcttgcctagatgaggaccccttctattcttgggtagccaggatttgaaggagatactctgacctgtgccagtggtaagtgactaatacttttacacactgaactggtcctggaaactgagatgtcttctttgtaagtgaagaatatacaacataatcttgaagaacggcacagtggtatgggccacaagcatactttatgtgtgtaacggactgaaagacaaattaatcttggtgaaaggatttttcatctcttatttctatttgccagtgttagtcagtgttctgctggcttagattattacctttttctggttccttactgtgttttattctgatgggtcctagaaatccctctcctgaccacttgtcagaatcagaaagtgaggaagaagaaaatattagttacctaaatgagagttctggggaagagtgggattcctctgaagaagaggactctatggtgcccaacttatcgcctcttgagagtcttgcctggcaggttaagtgccttttaaaatattccacaacttggaaacctttaaatcctaattcctggttgtatcatgctaaactgttggatccaagcacaccagtccatatacttcgagagataggtctaagactctcccattgttcccattgtgtccccaaactggaaccaattcctgaatggccccctctggcctcttgtggagtcccaccttttcaaaagcctcttacaagtcccagccggctctctagagatcatgccactctaaatggagcactgcaatttgccaccaaacagctaagccgaacattgagtagagccactcccatacctgaatacctaaaacagatccctaattcatgtgtttctgggtgttgctgtggctggctgactaaaacagttaaggaaacaactcgtactgaacccatcaacactacttattcttacactgacttccaaaaggcagttaacaaactcctaactgcatcactgtaaagatctaccatttgctctgatatctctgatgttgctaattgagaaagtggtacaaagttagtcattacacagcccactaatgccttctcagtcaaactctcttatgccctggcaagccaatgaggataccctttgacaaaccctgtggataaaatgataatatcaaggtcaggcatggtggctcacacctgtaatcccagcactttgggaggctgaggcgggtggatctgctgaagtcagaagtttgagaccagccttgccaacacagtgaaaccctgtctctactaaaaataaaaaaattagccgggcgcagcagtgcacgcctgtaatccctgctactcgggaggctgaaacaggagaatcacttgaacccaggagacggaggttgcggtgagttgagattatgccactgtactccagcctgggtgacagagcgagactcagtctcaaaaaaaaaaaaggagaattagttaaggggaccatattacaaaagatagttgaatattcttcacactcacttctcaccctccccaccccaatttactctgcctttctgaatggctttaatgagatacctgattattaatgaagaaaagtagaccaccaccccttttgttatccagactttagaacagccattgttgaaagcaagaagttagctacccacaataatacctttctgagcatactcttctctaacatacatttctgtggaagtagttgaattaaattgagtaactacacaaaggaaaatggcagggctatgaatttctttcccagcttttatatagatgtgcctacatatgacactctttagggttccttttattttttctttttttttttttttgaggtagttgaattaaactgggtaactacacaaaggaaaatggcagggatatgaatttctttcccagcttttatatagatgtgcctgcatatgacactctttagagttcctttcactttttcttttttttggaagggggcggggaggcaggaggagtgcagttttaagcctagcctatactactacaaacttattatggtacttaaaattacagcatgaacgttctatatcggagtctcccaccaggctgtctctgactaaatcagcctataagatcatcccttgggattaaacaaacacctgttctgtagggaatgtgtttcctgaatcttggtactcagacttttgtcaagagtaaataacatttcaaaagatgaatggaaaaatgattaagagagcatttctgctttcagcattaactgctaatggattaaaattttaatctgtatagcatttcctggagtaaaagctcaagtactttccacatccattgcaaacttttcaggaacccttctaattttttttttttttttttttttgagacggagtcttgctctgtcgcccaggctggagtgtagtggcatgatctcagctcactgcaagctctgcctcccgggttcgtgccattctcctgccctgcctcccgaatagctgggactacaggcgtccaccaccactcctggctatttttttgtatttttagtagagacagggtttcaccgtgttagccaggatggtcttgatctcctgacctcgtgatccacctgcctcggcctcccaaagtgctgggattgaacccttctaattttaaagaaccttgttattagaaaatctcagcctaatacaatctgaagttaagagttttagcagcattgtttttctaagtagatttagctatagattttcttctggccaaacaaggaagagtatatgcccttgtaaatgagtcttgttttgtttatttaaatagtcagtcaaaacgtagaaatcagtatacgtaaaataaaatgcatgagactattaaatcttttcatatactctacaaataaaatgaaatctgtgtgtggtcctggttgactgggcatctaaagggaatcagaaaagagattgtgaaaagttatatatatatcctcttccttattttagttttgctttttcctattttccataattaagtgccgtttacaaagtggcatcaaaaaattgaagcaggccaggcatggtggctcatgcctgtaatcccaacagtttgggaggctgagggcaggtggatcacttgagatcaggagttcgtgaccagcctggccaacatggtgaaagcccatctctactaaaaatataaaaattagccgggcgtggtggcatgtgcctgtaatcgcagctacttgggaggctaagacaggagaattgcttgaacctgggaggtggaggttgcaatgagctgagatcgcgccactgcactccagcctgggcaacagtgagacaccgtctcaaaaaaaaaaaaggttaggaatcacaaattgtgtaaatatatagcaactttaagaagagagaagaatgcttataacctagtgaatatttctgctgagccttagttgtcttgtctaaaggaaaaaagagggaattgtagaataaaagtatttgttagtggaaattattgacctgaaaccatatcatattgttagtgtaactgaatgtatcagaaattgttcctatgtaggtattctgtgaaactggtttctaaaatgttacaggaaactgtttcctttttttttgtttgtttgtttaagtggaggtgggaggaggtagggaagaggtctgaatattaaaatatgtttatgttcatgtgttcataatacgttcctttttctctctgtgtgtgtataaaagtgccttgctcatgaatgcatttttgctattcacttcgaaaggaagcctttccccagcttggcagctgaataaaccaatagctttgtacatgctgaa

SEQ ID NO: 2250 - DNA, 2745 bp, Homo sapiens
ctcgcgaggccggctaggcccgaatgtcgttagccgtggggaaagatggcggaaaatttaaaaggctgcagcgtgtgttgcaagtcttcttggaatcagctgcaggacctgtgccgcctggccaagctctcctgccctgccctcggtatctctaagaggaacctctatgactttgaagtcgagtacctgtgcgattacaagaagatccgcgaacaggaatattacctggtgaaatggcgtggatatccagactcagagagcacctgggagccacggcagaatctcaagtgtgtgcgtatcctcaagcagttccacaaggacttagaaagggagctgctccggcggcaccaccggtcaaagaccccccggcacctggacccaagcttggccaactacctggtgcagaaggccaagcagaggcgggcgctccgtcgctgggagcaggagctcaatgccaagcgcagccatctgggacgcatcactgtagagaatgaggtggacctggacggccctccgcgggccttcgtgtacatcaatgagtaccgtgttggtgagggcatcaccctcaaccaggtggctgtgggctgcgagtgccaggactgtctgtgggcacccactggaggctgctgcccgggggcgtcactgcacaagtttgcctacaatgaccagggccaggtgcggcttcgagccgggctgcccatctacgagtgcaactcccgctgccgctgcggctatgactgcccaaatcgtgtggtacagaagggtatccgatatgacctctgcatcttccgcacggatgatgggcgtggctggggcgtccgcaccctggagaagattcgcaagaacagcttcgtcatggagtacgtgggagagatcattacctcagaggaggcagagcggcggggccagatctacgaccgtcagggcgccacctacctctttgacctggactacgtggaggacgtgtacaccgtggatgccgcctactatggcaacatctcccactttgtcaaccacagttgtgaccccaacctgcaggtgtacaacgtcttcatagacaaccttgacgagcggctgccccgcatcgctttctttgccacaagaaccatccgggcaggcgaggagctcacctttgattacaacatgcaagtggaccccgtggacatggagagcacccgcatggactccaactttggcctggctgggctccctggctcccctaagaagcgggtccgtattgaatgcaagtgtgggactgagtcctgccgcaaatacctcttctagcccttagaagtctgaggccagactgactgagggggcctgaagctacatgcacctcccccactgctgccctcctgtcgagaatgactgccagggcctcgcctgcctccacctgcccccacctgctcctacctgctctacgttcagggctgtggccgtggtgaggaccgactccaggagtcccctttccctgtcccagccccatctgtgggttgcacttacaaacccccacccaccttcagaaatagtttttcaacatcaagactctctgtcgttgggattcatggcctattaaggaggtccaaggggtgagtcccaacccagccccagaatatatttgtttttgcacctgcttctgcctggagattgaggggtctgctgcaggcctcctccctgctgccccaaaggtatggggaagcaaccccagagcaggcagacatcagaggccagagtgcctagcccgacatgaagctggttccccaaccacagaaactttgtactagtgaaagaaagggggtccctgggctacgggctgaggctggtttctgctcgtgcttacagtgctgggtagtgttggccctaagagctgtagggtctcttcttcagggctgcatatctgagaagtggatgcccacatgccactggaagggaagtgggtgtccatgggccactgagcagtgagaggaaggcagtgcagagctggccagccctggaggtaggctgggaccaagctctgccttcacagtgcagtgaaggtacctagggctcttgggagctctgcggttgctaggggccctgacctggggtgtcatgaccgctgacaccactcagagctggaaccaagatctagatagtccgtagatagcacttaggacaagaatgtgcattgatggggtggtgatgaggtgccaggcactgggtagagcacctggtccacgtggattgtctcagggaagccttgaaaaccacggaggtggatgccaggaaagggcccatgtggcagaaggcaaagtacaggccaagaattgggggtgggggagatggcttccccactatgggatgacgaggcgagagggaagcccttgctgcctgccattcccagaccccagccctttgtgctcaccctggttccactggtctcaaaagtcacctgcctacaaatgtacaaaaggcgaaggttctgatggctgccttgctccttgctcccccaccccctgtgaggacttctctaggaagtccttcctgactacctgtgcccagagtgcccctacatgagactgtatgccctgctatcagatgccagatctatgtgtctgtctgtgtgtccatcccgccgaccccccagactaacctccaggcatggactgaatctggttctcctcttgtacacccctcaaccctatgcagcctggagtgggcatcaataaaatgaactgtcgactgaacaaaaaaaaaaaaaaaaaa

SEQ ID NO: 2251 - DNA, 4639 bp, Homo sapiens; identical to SEQ ID NO: 1085

SEQ ID NO: 2252 - DNA, 3968 bp, Homo sapiens
agtcgggcgggcggggaagtgcgggccgggtcaactgtcaccggctgcacccgggcttcagcgcctcgctcccgcccctggtaaacttcctgttgtcgggaggcagataccagctttgtgaccaattcaggaaaatgcctaactgatttctggttaggaattgggcggtcggagcgttctggagttcaatggaaccaccccaagcgcagactgcgtgcaggcgccgtagtcggcccgcaccggagggattcaaaggtgaagcgggccccggtcccctcccccgaggagcttaggctctggtgtgagagataagacgagaacacaaataactgcgataccgggaaggaggtgataagtcctgtgaaagaacgacggagtgctagaacggcacccggaaaaaccgaaccgatcacttctgcctcgcagaaacctggaaggcttcctgggcgggggatgctgagcagagtcttgaaggcctgatgggatttaggagaggaggattgcagaagaggtagcacaggcggagtgcagcggaggcccctgccgctgccgtcatgccgttcccgtttgggaagtctcacaaatctccagcagacattgtgaagaatctgaaggagagcatggctgttctggaaaagcaagacatttctgataaaaaagcagaaaaggctacagaagaagtttccaaaaatctggttgccatgaaagaaattctgtatggcacaaatgaaaaagagcctcagacagaagcagtagctcaacttgctcaagaactctataatagtgggctccttagcaccctggtagctgatttacagctcattgactttgagggcaaaaaagacgtggctcaaattttcaacaatattctcagaagacaaattggtacgagaactcctactgttgaatacatctgcacccaacagaatattttgttcatgttattgaaagggtatgaatctccagaaatagctctaaattgtggaataatgttaagagaatgcatcagacatgaaccacttgcaaaaatcattttgtggtcggaacagttttatgatttcttcagatatgtcgaaatgtcaacatttgacatagcttcagatgcatttgccacattcaaggatttacttacaagacataaattgctcagtgcagaatttttggaacagcattatgatagatttttcagtgaatatgagaagttacttcattcagaaaattatgtgacaaaaagacagtcactgaagcttctcggtgaactactactagatagacacaacttcacaattatgacaaaatacatcagtaaacctgagaacctcaaattaatgatgaacctgctgcgagacaaaagtcgcaacatccagtttgaggcctttcacgtttttaaggtgtttgtagccaatcctaacaagacgcagcccatcctagacatcctcctcaagaaccaggccaaactcatagagttcctcagcaagtttcagaacgacaggacggaggatgagcagtttaacgacgagaagacctatttagttaaacagatcagggatttgaagagaccagctcagcaagaagcttaatctccaataaacatctatgttaaatccaaattcagcatttgctgttagctattcagcatcaggcactcttattgattcatgaggaacattactgctaatctgctgttaagtgaacggtttttcattttacccttttgtttttcagtccaggttggagatcgtagctgctgctgcttgcacactagggcacatgtgggctttctcttgatctttgtgtcatttcagaattcaaagactgtgctacgggagttctgaacatggctgggttcatgaaggcaaatgtatggatgagagtgtggtttaggaaagagggcactgatatcagattagacctatgtgtttgcacccatctttgttggcgatctgagtgcagtgtggcaagtgcacacctggcatccctgcgtcagatcgcgcaccttcaggtcgcgcaccttcgctgaaggaagatgacgcagagctttatctgaaatcagaggggagctatccaaaatgggagtttgggggcagctaaagttgacatgcgaataaattgatactgaaacttagcaacttcttaaaagtgtaaagaagcctcataagatcataaggaaaatgtatatatgcttttcacagctttctagaattttttgacatttgattttcttgagacttgtaaacctggatatgttgaagggtatttgttaattttacttttcaaagatactttaaaacagtagagctagcaatgacaccttgcatttcatttcaacactgcttcaaggtttcttttgtatataattcttagaatgctcatttcttttaaatggtttaatttgtacagcagaggaatgttattgtagtagtatgtaactattacctaatactgagtttttgcaaaaaacaatgaatgctcatatgtaattgaaatacttcagatcacatgaaaatgctgatttaacatttaagtatcacagcattaaaagaaaaagaaagtaaaccagtcctttgtattcagttacctaatggggtgccatcaataagctgcgatacagccctggagctcagtcagccacaccttcctgcatcctattggccttattcattttaaatgagttaatgaatctgccagatctgtgaatgatagagattatgctaaattaatgctgattctttgtgtgtgtgggaaatctctgtagagcaccttttctttcttagactaagtaacccagtacaatagttgtgaactgaataattaaaactttggcttctcttaggaaaagacgacttcctagtcataggtgtcctatggggaaatttattttttttaatgtcctgttccttaatgctgcaaattatcagtatttataaagtaactgattttgcaccacttttttgttactgtgaccacggcagaacaatgtcttctagactatatctatgtaaagttattagaatggtatctgttcattttagtgatatgaagatcacaactaacaactgacaaatcagagtttgccagttcaaattcagcatggctgcagctgattaagaaattgatatgattattctttgctagcctctcttactaatggaattatatactggccagtaaaatgggcctcccaattgctgtttcagcaggttttaaaccttcaggaacaccagttaggaaaatagctccagaaaatatagatatattttatttttattaaaatggcagtctacatcataattggcatttctcaagactgtctttaccagaatctgtgtgaaataaggcaatctagtctccttgaaaaaaaaatctcttggatgtttaggaaggaagacttggccgtgatgtggtgtcctggctttgtggtgtagtgctgtgtgtatggagttagtgtaaaaacatggattacaccaagtggaagaaacgtcttcttgccaagctcattcttagaacttacacatctagaacagcttccactttggcagtgaggtcgtagccttttaggtggaagaagtgagggtgcagcgtgtcagacacaacattcatgttactcttacattggaatctgaaggtagttcagacttcgtgggttttgtttttaagcaaaacaatgtgaaaacatttaagtttgaaatgttgcatttgaagttatgatcatttaatatattcatattaccaagactattatactggaagtggtttttgtgttataaaggtttaattttacataaggcagttacttaatgtgatttttaacccttaaaaaagtggagatgtatacatttgttaacaatgccatgaaagcattttctttctcctaaggaaaagtgaatttcttatcagaatatctggctggccctgtaatttaaattaaaataaaattttggagaaacagcaaaaaaaaaaaaaaaaaa

SEQ ID NO: 2253 - DNA, 8536 bp, Homo sapiens
aaaaaaaagaaaaaaaaaggcacaaaaaagtggaaacttttccctgtccattccatcaagtcctgaaaaatcaaaatggatttagagaaaaattatccgactcctcggaccagcaggacaggacatggaggagtgaatcagcttgggggggtttttgtgaatggacggccactcccggatgtagtccgccagaggatagtggaacttgctcatcaaggtgtcaggccctgcgacatctccaggcagcttcgggtcagccatggttgtgtcagcaaaattcttggcaggtattatgagacaggaagcatcaagcctggggtaattggaggatccaaaccaaaggtcgccacacccaaagtggtggaaaaaatcgctgaatataaacgccaaaatcccaccatgtttgcctgggagatcagggaccggctgctggcagagcgggtgtgtgacaatgacaccgtgcctagcgtcagttccatcaacaggatcatccggacaaaagtacagcagccacccaaccaaccagtcccagcttccagtcacagcatagtgtccactggctccgtgacgcaggtgtcctcggtgagcacggattcggccggctcgtcgtactccatcagcggcatcctgggcatcacgtcccccagcgccgacaccaacaagcgcaagagagacgaaggtattcaggagtctccggtgccgaacggccactcgcttccgggcagagacttcctccggaagcagatgcggggagacttgttcacacagcagcagctggaggtgctggaccgcgtgtttgagaggcagcactactcagacatcttcaccaccacagagcccatcaagcccgagcagaccacagagtattcagccatggcctcgctggctggtgggctggacgacatgaaggccaatctggccagccccacccctgctgacatcgggagcagtgtgccaggcccgcagtcctaccccattgtgacaggccgtgacttggcgagcacgaccctccccgggtaccctccacacgtcccccccgctggacagggcagctactcagcaccgacgctgacagggatggtgcctgggagtgagttttccgggagtccctacagccaccctcagtattcctcgtacaacgactcctggaggttccccaacccggggctgcttggctccccctactattatagcgctgccgcccgaggagccgccccacctgcagccgccactgcctatgaccgtcactgacccttggagccaggcgggcaccaaacactgatggcacctattgagggtgacagccacccagccctcctgaagatagccagagagcccatgagaccgtcccccagcatcccccacttgcctgaagctcccctcttcctctcttcctccagggactctggggccctttggtggggccgttggacttctggatgcttgtctatttctaaaagccaatctatgagcttctcccgatggccactgggtctctgcaaaccaatagactgtcctgcaaataaccgcagccccagcccagcctgcctgtcctccagctgtctgactatccatccatcataaccaccccagcctgggaaggagagcttgcttttgttgcttcagcagcacccatgtaaataccttcttgcttttctgtgggcctgaaggtccgactgagaagactgctccacccatgatgcatctcgcactcttggtgcatcaccggacatcttagacctatggcagagcatcctctctgccctgggtgaccctggcaggtgcgctcagagctgtcctcaagatggaggatgctgcccttgggccccagcctcctgctcatccctccttctttagtatctttacgaggagtctcactgggctggttgtgctgcaggctccccctgaggcccctctccaagaggagcacactttggggagatgtcctggtttcctgcctccatttctctgggaccgatgcagtatcagcagctcttttccagatcaaagaactcaaagaaaactgtctgggagattcctcagctacttttccgaagcagaatgtcatccgaggtattgattacattgtggactttgaatgtgagggctggatgggacgcaggagatcatctgatcccagccaaggaggggcctgaggctctccctactccctcagcccctggaacggtgttttctgaggcatgcccaggttcaggtcacttcggacacctgccatggacacttcacccaccctccaggaccccagcaagtggattctgggcaagcctgttccggtgatgtagacaataattaacacagaggactttcccccacacccagatcacaaacagcctacagccagaacttctgagcatcctctcggggcagaccctccccgtcctcgtggagcttagcaggcagctgggcatggaggtgctggggctggggcagatgcctaatttcgcacaatgcatgcccacctgttgatctaaggggccgcgatggtcagggccacggccaagggccacgggaacttggagagggagcttggagaactcactgtgggctagggtggtcagaggaagccagcagggaagatctgggggacagaggaaggcctcctgagggaggggcaggagagcagtgaggagctgctgtgtgacctgggagtgattttgacatgggggtgccaggtgccatcatctctttacctggggccttaattccttgcatagtctctcttgtcaagtcagaacagccaggtagagcccttgtccaaacctgggctgaatgacagtgatgagagggggcttggccttcttaggtgacaatgtcccccatatctgtatgtcaccaggatggcagagagccagggcagagagagactggacttgggatcagcaggccaggcaggtcttgtcctggtcctggccacatgtctttgctgtgggacctcagacaaaaccctgcacctctttgagccttggctgccttggtgcagcagggtcatctgtagggccaccccacagctctttccttcccctcctctctccagggagccggggctgtgagaggatcatctggggcaggccctccacttccaagcaagcagatgggggtgggcacctgaggcccaataatatttggaccaagtgggaaacaagaacactcggaggggcgggaatcagaagagcctggaaaaagacctagcccaacttcccttgtgggaaactgaggcccagcttggggaaggccaggaccatgcagggagaaaaagcagacttcctctggccaccgctaagtattttgttccctaagtcccccacagggtggtggaacagaagagaaaactaaggctcagcaaggtggagtcctcaagcagtgactggtgggggtggggctgggactcgggctcctgacccccaacccatggtgttccctgtcaccctggtctatccacatctcctattcctgaggagagttgacagtaagagcagtgagagatggttctgggccccatgccctagacaatcagtctgtaagaactgccaaggaagcctggtcacccaggccagggatggagcccagcgagctcacagcaggcacatgcacccccgcccccacccagaacctgcggggcaaagaagggaggtagttggggccagagtccacctccaggagccagggtgagctggctgcagcttccacctgtcaggtaaggtaggagaaggtatgttacctggcatctctctccctgcctccctccatttagcaggaagtggtggggtcaggggtcttcagcacagacttcttgagcctctgccccctgtcacccttcttttggaatgatgtgtacccacatctttggatcctgccctccttgtggttccaggctgttgggaggaggtcagcctcccctgaaccagctgcctgaggcatgcagcatccttcctcggcaaagcccacctggctcacagcggccccctctccccatcctgttcctcttcttgccctgtaatgagctccccccatacctttcctccctcacctgaggctttgctggtcctcagattggttttgtatttgtgagacaaccacttgactcctgggctgccaggcggaagcacaagcgcacatggatgcacacggatgttctcacacacacacgcccgctctcaccaattcacagcacctcgtggtccagcggagctgcctgggagcttggtgaggatggctccaaaggacacaagccgttgagtagatgccagagaattctgaatggaaaacacaagtccggggcctcaccagcatcgtggcagaaggcctggggcatttctccatgggccttcttccctgtgttcgagctctgacttttggaaaaggacattgtggattttatgaaaatttctcataccatcagtctagctccaacctagaaaaattggatgatatatcaaacccaacatccctttcccaaggcaccttagttaaggctagcccttccataactgacattgtacggtgctttgcaatcctcaaccactctgtggagcaaagagcatgatgcctactttatagacggggaaattgacatttggggctctcacggcaacatagaggcgaagtgaattctcagatctccaggccccattctctctccaccgagttgtgctcctgtcatgggagtgtatggcttaaagacactcccccacccccattccctagaaatcccccagacccacaatcaggcaagaaagaacagggacccagaggctggcctgacctaggggcctgcaggttggcggctttgtttcctaagaacattgaaacctgcggagtctttgaccaaatccacaacagtgcttctgaggtttcatccagactctttcccagctgtccctgaggttcagagggtatcagagtcaattcaaggccatgccataatccctgaccaggcctggacatgggtccagccctgactccaggggtccaggtgccaaggtcatgtgctgtcccccacttccctttctttgccttcgcactttggaacaggctccaggcctggctgtgacagtatgcaggagtgcccaagccagggccaccagggtgtccacagcccctggaaacacagatcacaatctcaagtcccctgaatgaactgcttcctgggtgaacggggtggtgtagccttgccactcgggcagcgcaccagacagtacggtgcagcagtgcccgagatgcccagaagtgtgcctgcccccctgagtggcattcaagtatgaaaacttgtaaaattttctgtcggcctaaagaaaaatgtccatgggccaaacttgacccactgggcaccagcctgtgagccccaatgcctgtcaattgccccctttctcattcacctcctgtcctttgttgcagatttggaggagatgggagcccagagaggtgagagatgtgcttcagggtgtccagcaaggcaggggtagaaacgggcacgcccagagcctgccactctcccaggcctcatcttgggctcttgcaagtcttgcgctttgaagatggagttgggtggaaggtcagaggcgctggggacgggattggggagctgctgggttttcaggggaggtcagtgctgcttgggcacctttcacatgtgcagggaagagactcagatgtggccacagggcactgaggggtgaaatccatttaccagaagtcacgctccagaacgactgcccagccttggcagccagtggctccagccaccccctcctcatgacattcagccagaattgagctccaagccagggaagcaaatcttaaaaaccaaccaagcaccctgacacagccctagaaacacgatgagtctgaaatacagcttcccaggaggggagtctaagatacagcttcccgggagggtggaaaccaactcctgccccacggccaggccaggcccaggcaggcatgggtggatcccacagggctctgagctagaccggctccacggtggccccactacgaggccagttctgcagtcttggccttgtcacccatcgagaggctgctctgatggttcccagccacacaccagctctcctggggaaactatttctttcgttcttttggcctcggagaggtccgaggcaagtacatttcttaaaaggtaataaaatgcattattggaaagttggacagtcaggccacgactcctagcccacggcgtgccccacctcccagcagccccttcagccccttgcccctgttgccccaaacctcagggttccctcttgcatattcatgggggaaccacagtgctgatgtgtacttccccactgtcagctcggctgcacctcgtgtggcgccaggtcccaagggcctctgcagaggccaggctgtgagccccttgcctgcctgctcccctgatgaggcaacagcttctctgaaatgagctgccggccaggagcaggcaggcaccagcctgtctttccttttctggtaattcctcagcactgaggctccgttcctgggcaccccaggattgaagggaacctcagaatcatgtcactgccattctagagtttcaatccaaggggtcccctttagctcatctccaagatgggtaaacgtagccaccattcagaaagcccagaaattcttgttcccacatcttagacccctgagcaacacaaggagaaaatgcagctgcttacctattaatatctactgagggacaatcagcaaagcctcaaaggagtcgtctcaggtagggtacttggcctgtggcaggagagacagaggcacaaacccacccacccatcagcttccggtggctgatcggggcccagggagggaagcaggtgaaacagcagggtgggggtgacttggcagtcgtgcatctcctccccgactctgaggcctggcaggaggaggccacaccagcctcacctgccctgacccccgccccccaccctgtgaccctgtggctatggccgctggtcgcccttgtccccaaaatcaccatgcctgtggccacgtccctcatcttctccaaaagcatcattaagaacaagtgattttggatgatggatttttgatttacaaacggcgcatttcccttggagtggaacagaaaggaaaccatttaatggcgcccttcttttcaagcatgaatacattttaatgaaactattttattgtatttgaggaaatggagagttgaacattccaaccaatcaatagccaattaattgctataaagctaaaaagaaaataaataaatcctgagtctattttaaacactgcaaaaagttcagagcctcagaatctggccttcccctccataaggtgcacgagcatgtaaacacacacacacacacacacacacacacacacacactcactcactcccctacacctcagacatacttgaaactcagaaacagcactgagtctccccatgccaattcttgcctgctgtcttcgacttgggtcagagaaggtgagcagacccggcagcagcctgtcccggggctcaggaagaggcaggcccatcccctggccccaagcacccagcacaacagagggtggcgggcagtgagggcctggcgttgcctgggccccacttctcagccccagctgctgggcctccaaggttgggctgaggatggagttttggctctgggtttgccctgactcctgctggaagacgctgccctggtttttcaccctctagtggccttggacattgagtatttgtagaaatgcagattacattgcaaatggaaacctttgccaggaagacacatgcattttgcttttaattctttgagacatttgattttgtcttagggactgacctttcagcatcaaagaaatacatatctactgtatccgccaaagtttgtgatgcctgcatagacgcttacttgtaaaaaaaaaaaaatacaaaaaaatacaaaaaaaccaacaacaaaaaccacaattgaattgcctttgaaagtgggagatgatctgtctccaacggattgaaaaaaaaaaatgcttcttaaaaaatgtgtatgttttgtattctttttttctagtagaaaataactgacttgaaatattggtggtttttttcttagtgacgtgtgttgcttttgtgtgtaataatatttgaatgtaattacagcagtgccaatttgccaaagatgttggacatatttttcttttttggggaggagggcagggctaggggtgggacttgggagaaaacaggggtggggttttggtttaattttttttttacttttttttccttgtcaaacctgaaatttgtggcttccttttaagttaaatggttgactgcaacacctttattttagattagttggagaaacatgcaataagattggcgtagtttcaatatctgtgtgtcttttcatgagtggctgttacttgtgaagaattgattttatgtaacctttatgtgagataattatttgtaaatatttgccataattttattggttcctaaaataaaagtaattttttaagttca

SEQ ID NO: 2254 - DNA, 4577 bp, Homo sapiens
agctcagtgtcacagacctttgtggaagcaacaacagctcccatccttccaacctttctggagaagccgtggcctgatggtgagccgaatgggctggggggggagaagaaggcggctggggcggtggggagatctggggcccggatcggtgcccctcctccccatgccactgccacctcctcctcctccttcatgccggggacctgggggagggaggatctccatcttctctctgtcccctgcccctcatacaagaagctccccctcctcattttcccctcccaccgcagggcccccttgctcagtgctacaggggacaggggcttctcagtcttgccacagtgctctccctatcccagccacccccccaacacaggctcaacctgcaatgacacctgcctctgcatctccctcctggggatcccactccaccccacccctggccccggcaacccccactccctcacagcagtgcccccaggactctcctgggctgcgggtaggccctttgatccctgaacaggattatgagcggctggaggactgtgaccctgaggggtcccaagactcacccatccacggggaggagcagcaacccctgcttcatgtccctgaagggctccgaggctcctggcatcacatccagaacctggacagtttcttcaccaagatctacagctaccaccagcggaatggctttgcctgcatcttgctggaggatgtcttccagctgggacaatttattttcattgtcaccttcacaaccttcctccttcgatgcgtggattacaatgttctctttgccaaccaaccaagtaaccataccagacctgggccgttccacagcaaagtgaccctgtcagatgccatcctaccctcagcccagtgtgctgagaggatccgctccagcccgctgctggtcctcctcctggtcctggctgccggcttctggctggtccaactgcttcgctcagtctgcaacctcttcagctactgggacatccaggtgttttacagggaggccctgcacatccccccggaggagctgagctcggttccctgggcagaggtgcagtcccgcctcttggcactgcagcggagcgggggcctgtgcgtgcagccgcggcccctgacggagctggacatccaccaccgcatcctgcgctacaccaactaccaggtggcgctggccaacaaaggcctgctgccggcccgctgcccgctgccctggggaggcagtgcggctttcctcagccgcggcctggcgctcaatgtcgacctgctgctcttccgcggtcccttctcgctcttccgcgggggctgggagctgccgcacgcctacaagcgcagcgaccagcggggcgccctagcagcgcgctgggggcgcacagtgctgctgctggccgccctgaacctggcgctgagcccgctggtgctggcctggcaggttctgcacgtcttctatagccacgtggagctgctgcggcgcgagcctggcgcgctgggggcgcgcggctggtcccgcctggcgcgcttgcagctgcgccacttcaacgagctgccgcacgagctgcgcgcgcgcctggcccgcgcctaccgccccgccgccgccttcctgcgcaccgctgcgccccccgcgcccctgcgcacgctgctggcccgccagctcgttttcttcgcgggtgcactcttcgccgcgctgcttgtgctcaccgtctacgacgaggacgtgctagccgtggagcacgtgctcaccgccatgaccgcgctcggggtcaccgccaccgtcgccaggtctttcattccggaagagcagtgccagggtcgtgcgccgcagctcctgctgcagacagccctggcccacatgcactacctcccggaggagcccggccccggcggcagggaccgcgcctaccggcagatggcgcagctgctgcagtaccgagcggtctccctcctggaggagctcctgtccccgctcctcaccccgctgtttctgcttttctggttccgccctcgtgccctggagattatcgacttttttcatcacttcactgtggatgtggctggggttggggacatctgttcctttgcccttatggatgtgaagcgccacggacaccctcagtggctctcggcgggacagactgaggcctcgctgtctcagcgtgcggaggacggcaagactgagctttctttgatgcggttctccctggcgcatccactctggcgccccccagggcacagctctaagtttcttgggcacctctggggccgagtacaacaagatgcagctgcctggggtgccacctcggctcgcggcccctccaccccgggggtgctcagcaactgcacctcgcccctgcctgaggccttcctggccaacctcttcgtgcaccctctcctgcctccgagagatctgagcccgacagccccctgtccagctgcggccacagccagcctccttgcctccatttcccgaattgcccaggaccccagctctgtgtccccaggaggcactgggggccagaagctggcccagctcccagaacttgcttctgccgagatgagtctccatgtcatctacctgcaccagcttcaccagcagcagcagcagcaggagccgtggggtgaggctgcagcctccatcctgtccaggccctgctccagcccctcacagccaccctcgcctgatgaggagaagccatcctggtcaagtgacggctccagtcctgcctctagccccagacaacagtggggaacccagaaggcccggaatctgttccccggagggtttcaggtgaccacagacacccagaaggagcctgaccgggcctcttgcactgactgagacgactcctcagggccccactcctggcagctgagtgctgcacctgccttctcgatcacgagcctgagaactgcacgggggagcagcccagactggctggaaaccatgttttcagagtgcagggtcaagtggcgtcctctggacagatgtgagaaggcaccacctcaagaggggaggagcggggctgatcctggtcgggcggacctgagtcgggcagccgctctcccggaactggaagggaaagccaggcggctctcaggggctgttggtgtctgagccgggagggtcgaacgcccagggcactgcgccccgcaactgacgctcctgcaaggaaaagctctggcacgccgatgacgtcgccggcctcgtccagctccatgtcgccctccgtcgccaggatgcgctgcacggtctgcaggacgttggttgccatggtaacatcgccgcagacaaacatgtggccccgctcgaggcacagcacgcggtgcacctccgcagccagctccgtcctcaggatgtcctgcacgttaccattgcgccctcagggtctcacaccttggggttgtcaggttcccgggagaaggcggtgaggactcggccaaacaccccgcgctgctgggcgttctgcacctcgtcgcggtagagatggtcaagttgggagcatcggcagccgaacaccaaagtcatgggagtgggctgcagccctgcaagcaaccccgcgcttgggaaggctcttctccggggcacagtgctagtggggcctccccacaggccaccgtcgcccagcctggcagcccagcgttttgggctgaaaccaccattactttggctgtttcatctctaagagagtgtagaatgctttcacagagaccctgcacagccctgatttacagagggaagggaagcgcgggtgaggtggtggcccctggtggagctgcgctagaatgcgcggcttcggactcagaattccatgccctttgcattgtgtgacatcgcagtccccttccccgctcccacttcatattctcccatacttataactctcctcccagtcacagccctcttcttttgattgacagaccaccctgggcaccccatgctcaatatgaacaccttgtagcatccttaggtcttggacagacctcggtcagctctggcacagtcaagaatccaccttgggcagttcttctttgagtcttagccctaatccctttgaaaattctattttcctttgtcctcaatccagtcaacacctactatgtaccaggcaccaggaagccagaagctcagggcccagcccttgcctttggtacctgccctccccttggtctcatgagcgtcttttcagctttgtggactttgtttcctgccctctctttcctatttcctgccttccagccccacccctctgtccctagattgtgtgactcccttcaggcagtcctttagtccccagcctcacctttgctctcaatgtcatgcagccgctcctgccagaatccccggaagggggcaatgccagtgcctggacccaccaggatgcagggcaagctgggatcgggtggcagccggaaggagggagccctggcaggagagacactccatcaggtcccctttgcctttcctgctccaccattctcaccatgcagggtgggtggagcaaggaggacccaagttcttcccatctcaaaaaaaaattaaaaaaaaaacaaaaaacaaaaaacaa

SEQ ID NO: 2255 - DNA, 3224 bp, Homo sapiens
ctggccaacaagggctgcagaggatgcacacatcaggaagagggtgggggactacttgcttgctggttttgcttgcatctgatgagtagaaattcagcctattctttgttttggaaatacaaaagatataataatgatatatgaagaagatgctgaggaatgggctctgtacttgacagaagtatttttacatgttgtgaaaagggaagccatcctgttatatcgcttggagaatttctcttttcggcatttggagttgctgaacttaacgtcttacaaatgtaaacttttgatattatcaaatagcctgcttagagacctaactccaaagaaatgtcagtttctggaaaagatacttcattcaccaaaaagtgtagttactttgctttgtggagtgaagagttcagatcagctctatgaattactaaatatctctcaaagcagatgggagatctcaactgaacaggaacctgaagactacatctctgtaatccagagtatcatattcaaagattctgaagactactttgaggtcaacattccaacagacctacgagcaaaacattctggggaaataagtgagagaaaggaaattgaagaactatcagaagcttcaagaaacaccataccactagcagtggtgcttcccactgaaattccatgtgagaatcctggtgaaatattcataattttgagagatgaagtaattggtgatactgtagaggttgaatttacatcaagtaataagcgcattagaacacggccagccctttggaataagaaagtctggtgcatgaaagctttagagtttcctgctggttcagtccatgtcaatgtctactgtgatggaatcgttaaagctacaaccaaaattaagtactacccaacagcaaaggcaaaggaatgcctattcagaatggcagattcaggagagagtttgtgccagaatagcattgaagaacttgatggtgtccttacatccatattcaaacatgagataccatattatgagttccagtctcttcaaactgaaatttgttctcaaaacaaatatactcatttcaaagaacttccaactcttctccactgtgcagcaaaatttggcttaaagaacctggctattcatttgcttcaatgttcaggagcaacctgggcatctaagatgaaaaatatggagggttcagaccccgcacatattgctgaaaggcatggtcacaaagaactcaagaaaatcttcgaagacttttcaatccaagaaattgacataaataatgagcaagaaaatgattatgaagaggatattgcctcattttccacatatattccttccacacagaacccagcatttcatcatgaaagcaggaagacatacgggcagagtgcagatggagctgaggcaaatgaaatggaaggggaaggaaaacagaatggatcaggcatggagaccaaacacagcccactagaggttggcagtgagagttctgaagaccagtatgatgacttgtatgtgttcattcctggtgctgatccagaaaataattcacaagagccactcatgagcagcagacctcctctccccccgccgcgacctgtagctaatgccttccaactggaaagacctcacttcaccttaccagggacaatggtggaaggccaaatggaaagaagtcaaaactggggtcatcctggtgttagacaagaaacaggagatgaacccaaaggagaaaaagagaagaaagaagaggaaaaagagcaggaggaggaagaagacccatatacttttgctgagattgatgacagtgaatatgacatgatattggccaatctgagtataaagaaaaaaactgggagtcggtctttcattataaatagacctcctgcccccacaccccgacccacaagtatacctccaaaagaggaaactacaccttacatagctcaagtgtttcaacaaaagacagccagaagacaatctgatgatgacaagttccgtggtcttcctaagaaacaagacagagctcggatagagagtccagccttttctactctcaggggctgtctaactgatggtcaggaagaactcatcctcctgcaggagaaagtaaagaatgggaaaatgtctatggatgaagctctggagaaatttaaacactggcagatgggaaaaagtggcctggaaatgattcagcaggagaaattacgacaactacgagactgcattattgggaaaaggccagaagaagaaaatgtctataataaactcaccattgtgcaccatccaggtggtaaggaaactgcccacaatgaaaataagttttataatgtacacttcagcaataagcttcctgctcgaccccaagttgaaaaggaatttggtttctgttgcaagaaagatcattaaagaaggttattataatgaaactcacgaatctacggacattttgctttcagggtgaagcaagcttgaatttggattgcctgctctctttaaagcgaattcatactatgacagcagaaacaaaacttcagatttcagaatttgttattggcaaaatttattctcattatacctgcttcatatgggtatattactattaaaacagaataccatagagtaattgcattatttgaaaattctctcattttacaatgcacttcaccaatgaaacagctaatttccattttgaaaattaaaagaaaacagcacagagaagttaaatgcggtgtagcaaagttatggggtctgcttgagggcactaacctcaacagattattcctcctctccttagaataaccatgaaaatacaaatttacttagcacatttttgctttttaagtagctggttcattttctgaatttctcacattcagagttccagtcattattgttacatcatgtttgcagaaaccttgtcttatttagtgtctatttgcatataaccctgaaaacattattatttgaaaacttttctatatctcaaattaatatacattttcataacctacctttgtattaagacttgcaattttatcaatctattatttcttagaaacaatttactagcttagaatagaaagcaatgttatcgtcatataattttcatgtacaaatgccacaaataaattgaatgtttaaagctatgtctgagtttttaaagtaaatttataagaattagccaataaaattgcttctcggccttttggctaagatcaaaaaaaaaaaa

SEQ ID NO: 2256 - DNA, 3138 bp, Homo sapiens; identical to SEQ ID NO: 2013

SEQ ID NO: 2257 - DNA, 2381 bp, Homo sapiens
gacaccactggccgcgaagcgcagggggggcgcgcgcgctgccgcccgttcccagcacttgtgcagactcctccggggaagagcggcctccgcggtcatctccaacggaattctgcctttgaagtgtcggggcacggcgcgtcgagggtcctggcggccaggcggggcgtgtgcaagggtcgcgtcccccccccgggcccccggcccgtggctcttggtagagcccagtgcttcatttcccgtgcgcggcccgggcggccctccctttcatcagtcttcccgcgtccgccgattcctcctccttggtcgccgcgtccttggctggcgtgaggccaaagcaaaatgaggagcgggaaggcctcctgcaccctggagaccgtgtgggaagacaagcacaagtatgaggaggccgagcggcgcttctacgaacacgaggccacacaggcggccgcctccgcccagcagctgccagccgaggggccagccatgaatgggcccggccaggacgaccctgaggacgctgatgaggcggaagcccctgacggcggcagcaggcgtgatcccaggaagagccaggacagcaggaagcccctgcagaaaaagaggaagcgctcccccaagagcgggctcggccccgcggacctggccctcctgggcctctcggccgaacgcgtgtggctggacaagtcacttttcgaccaggcagagagctcctaccgccagaagctggcagatgtggctgcccaggcagcctggcctcctgccttggccccttggggtctctgcacccatggaaaccaggtggcctgccaccacgtgacctgggggatctgggtcaacaagtcctccttcgaccaggctgagcgggccttcgtggagtggtctcaggccctgttgctggcccccgagggcagccgcaggcaggggactcccaacacaggccagcaggtggccgtccccgacctggcccaccagcccagcccaccggtcaatggccagcccccgctgggcagcctgcaggcactggttcgggaggtgtggctggagaagccccggtatgatgcagccgagaggggcttctacgaggccctgtttgacggccatcccccagggaaggtgcgcctgcaagagcgagccggcctggccgagggtgcccggcggggccgcagagaccggcggggccgcaacatcttagggaacaagcgggccgggctgcgacgggccgatggggaggccccctctgccttgccctactgttacttcctgcagaaggatgcagaggccccctggctcagcaagcctgcctacgacagcgccgagtgccgccaccacgctgccgaggccctgcgggtggcctggtgcctcgaagctgcctccctgtctcaccgacccggtcctcggtctggcctgtccgtgtccagcctgagacccaacagaaaaatggctacaaacttcctagcacatgagaagatctggttcgacaagttcaaatatgacgacgcagaaaggagattctacgagcagatgaacgggcctgtggcaggtgcctcccgccaggagaacggcgccagcgtgatcctccgtgacattgcgagagccagagagaacatccagaaatccctggctggaagctcaggccccggggcctccagcggcaccagcggagaccacggtgagctcgtcgtccggattgccagtctggaagtggagaaccagagtctgcgtggcgtggtacaggagctgcagcaggccatctccaagctggaggcccggctgaacgtgctggagaagagctcgcctggccaccgggccacggccccacagacccagcacgtatctcccatgcgccaagtggagcccccagccaagaagccagccacaccagcagaggatgacgaggatgatgacattgacctgtttggcagtgacaatgaggaggaggacaaggaggcggcacagctgcgggaggagcggctacggcagtacgcggagaagaaggccaagaagcctgcactggtggccaagtcctccatcctgctggatgtcaagccttgggatgatgagacggacatggcccagctggaggcctgtgtgcgctctatccagctggacgggctggtctggggggcttccaagctggtgcccgtgggctacggtatccggaagctacagattcagtgtgtggtggaggacgacaaggtggggacagacttgctggaggaggagatcaccaagtttgaggagcacgtgcagagtgtcgatatcgcagctttcaacaagatctgaagcctgagtgtgtgtacgtgcgcgcgtgcgtgaggccctgccacgattaaagactgagaccggccctctggctccgtcctggtcatttcctgctc

SEQ ID NO: 2258 - DNA, 202 bp, Homo sapiens
  misc_feature (44)..(44): n is a, c, g, or t
  misc_feature (50)..(51): n is a, c, g, or t
atttaattgatttaatactgttatctaatatacagtcatatttnaatttnntttatccttccaatactgttccctccccaccctcccaccccaattcaggagccaatctaggattatgacatggatttagttgccatgtatcttcagtttcaattttcctttgtcttttcataacattgactttttttaagagaacagctgg

SEQ ID NO: 2259 - DNA, 1381 bp, Homo sapiens
gggggaaaactaagagagttctttgacaacagacccgtcctaaaataattgctacaagaagtttttcagacagatgagaaatgataccagaagttaacttggaatatcaggaatgaaaaaaagaccaacagaaatggtaaagatctgaggtaatgcaacattctgtgctgctcttgagttctttaaaatacgttttatggttaaaacaaaaattataacattttttgatggtgttttcaatgttatatgtagatagcacataagacaactacaacataaagagggtagaataaaagaaactaaagttttacattacacttaaaatggtaaaatattgattctaagtagaccatggaaaggtaaagacgtatattgtaatccctggagcaaccactaaaaacaaaaacaaaaacaaacagaactatacaagcagataaagttaaaaacacaataaatgtccttaaaatggtagacacaaatccaaccatatcagtaattccattaaatgtaaatgatctaagaatggtatcagcaaaaatggaatagagaactccaaaactcctttttccataaaaaacagtgaaaaaaactggcaaaatcaactttattagaactctggagactaataaaaagtttaataaataaaataaattcttttttttaataaaataaattcttttttttttttttgagggagagtctcattctgttgctccggctggagtgcagtggtgtgatcttggctcactgcaacccccacctcctgggttcaagcgattctcctgcctcagcctcctgagtagctgggattacaggtgccctccaccatgcccagctaatttttgtattttcagtggaggcagggtttcaccatgttggccaggctggtcttgaactcttgacttcaaatgatccacccacctcagcctcccaaagtgttgggtttacaggcatgagccacaatgcccagccaataaattttaatcaagaagaaaaacggctaaatctcagtgggataacactgtggtgttttaacatacctgggctccattctcctctttcccagcttggtggcagccttgaagacaacagcctgcattcttgatataggttcttagtgttcgagggagcagaatggaacttactctcaaaggattgtggttgcctgttttgacctgtctgttggttccctgaaggatgagcacaaaagatttactttaatttcacctaacttagaattctcccagggctgaagcagctacctggggcatttggaaaaacaaacaaaccacacacacatgcacagagttaaaaacaaatgcattcactaatggtaacagttagggaaataatagacaaaccaaaaaaaaaaaaaaaaaaa

SEQ ID NO: 2260 - DNA, 1142 bp, Homo sapiens
cttttccaagcggctgccgaagatggcggaggtgcaggtcctggtgcttgatggtcgaggccatctcctgggccgcctggcggccatcgtggctaaacaggtactgctgggccggaaggtggtggtcgtacgctgtgaaggcatcaacatttctggcaatttctacagaaacaagttgaagtacctggctttcctccgcaagcggatgaacaccaacccttcccgaggcccctaccacttccgggcccccagccgcatcttctggcggaccgtgcgaggtatgctgccccacaaaaccaagcgaggccaggccgctctggaccgtctcaaggtgtttgacggcatcccaccgccctacgacaagaaaaagcggatggtggttcctgctgccctcaaggtcgtgcgtctgaagcctacaagaaagtttgcctatctggggcgcctggctcacgaggttggctggaagtaccaggcagtgacagccaccctggaggagaagaggaaagagaaagccaagatccactaccggaagaagaaacagctcatgaggctacggaaacaggccgagaagaacgtggagaagaaaattgacaaatacacagaggtcctcaagacccacggactcctggtctgagcccaataaagactgttaattcctcatgcgttgcctgcccttcctccattgttgccctggaatgtacgggacccaggggcagcagcagtccaggtgccacaggcagccctgggacataggaagctgggagcaaggaaagggtcttagtcactgcctcccgaagttgcttgaaagcactcggagaattgtgcaggtgtcatttatctatgaccaataggaagagcaaccagttactatgagtgaaagggagccagaagactgattggagggccctatcttgtgagtggggcatctgttggactttccacctggtcatatactctgcagctgttagaatgtgcaagcacttggggacagcatgagcttgctgttgtacacagggtatttctagaagcagaaatagactgggaagatgcacaaccaaggggttacaggcatcgcccatgctcctcacctgtattttgtaatcagaaataaattgcttttaaagaaaaaaaaaaaaaaaaaa

SEQ ID NO: 2261 - DNA, 698 bp, Homo sapiens
atgagcttctggtgtgagtgtgtaccagtgagcgtctggtgtcagcacctctttgttgaccagcccgtggtctttccccaggagcggggaggtgaccttgcagagctgaccccggacacccagctcctccagctccggtccaccctccgactccggggaccgaggggctggaaggtggggagacgcccgaatctcacctgtgaccgtgagcctggtgcccggcccgaagtactgctcgtaggagcacggaggtgcacccccgcatgcaaacctctaaggctccccgagctcctgcccaccctggggacccagcccaggtctcccagcacagggccggaccgggtgccgcgaagcagccgccgccttccacctgaatcccgccgcccgggtggtcccgcgaaaactcacccagcacggtcagcctgctgccggccccgaaagtcaggacgttggccccagagcacagcccggggactccccgcaaaaaccagacccaagccgcccgcgcccgcgccccagcagcccgcgctcaccgagcaccaggagccgcgtgcctggcccgaagtactgggtctcttggtcacggcccccgagccccgcacaaaaacccgagcgcagtctcgtccccggtcccccggcggccccagcttacccagcactgagagccgggtcccggcgccgaagtactgaatgttttt

SEQ ID NO: 2262 - DNA, 3232 bp, Homo sapiens
gtgcacgtcggcttccgggaagagctttacgatacattgaccgacattttacgacaggcgggattgttttgtggctgtcagctttccccgtggtctgagtttgtggctgcatttttatctctggtggctctgctacggcggcgcagaaatgaggcagaagcggaaaggagatctcagccctgctgagctgatgatgctgactataggagatgttattaaacaactgattgaagcccacgagcaggggaaagacatcgatctaaataaggtgaaaaccaagacagctgccaaatatggcctttctgcccagccccgcctggtggatatcattgctgccgtccctcctcagtatcgcaaggtcttgatgcccaagttaaaggcgaaacccatcagaactgctagtgggattgctgtcgtggctgtgatgtgcaaaccccacagatgtccacacatcagttttacaggaaatatatgtgtatactgccctggtggacctgattctgattttgagtattccacccagtcttacactggctatgagccaacctccatgagagctatccgtgccagatatgaccctttcctacagacaagacaccgaatagaacagttaaaacaacttggtcatagtgtggataaagtggagtttattgtgatgggtggaacgtttatggcccttccagaagaatacagagattattttattcgaaatttacatgatgccttatcaggacatacttccaacaatatttacgaggcagtcaagtattctgagagaagcctcacaaagtgtattggaattactattgaaaccagaccagattactgcatgaagcgacatttaagtgacatgttgacctatggctgcacaaggctggagattggggtgcagagtgtttatgaagatgtggctagagacaccaacaggggccacactgtgaaggcagtgtgtgagtcatttcacctggccaaagattccggttttaaagtggtggcccatatgatgcctgacctgccaaacgtgggactagaaagagacattgaacagttcacagagttttttgagaaccctgcttttcgtcccgatgggctgaaactctatcctaccctggtgattcgtgggaccgggctttatgagctttggaaatcaggaagatataagagttactctcctagtgacctggttgaattggtggctcggatcctagccctcgtgcctccatggactcgagtgtaccgagtacagagggatattccaatgcctttagttagctcaggagtagagcatggtaacctgagagagctggcacttgcaagaatgaaagacctcggaatacagtgtcgagatgtgagaaccagagaagttggaatccaagaaattcatcacaaagtacggccataccaggttgaattggtaaggagagattatgttgcaaatggtggctgggaaacattcttgtcatacgaagacccagatcaagacattttgattggcctcctacgattacgcaagtgttcagaagaaactttccgtttcgaattgggtggaggtgtctccatagtacgagagctgcatgtgtatgggagtgtggtccctgtgagcagccgggatcctactaaatttcagcatcagggatttggcatgctgctgatggaggaagcagaaagaatagctagagaagaacatgggtctgggaaaatcgctgtgatatcaggggtcggcaccaggaattattatagaaagatcggctacagattacaaggcccgtacatggtgaagatgctgaaataatggccacaccagtccactcttctgcagtatcctccctggcagaacacggagaatcaggatttcttaaatactcaacagagaggctgagcagagcaaatggggggcttcaccctcatcccgcagctgcagagactggaaactgccttcaaggccacggctggtcatctgctgaccacaccccagatccgccctctcctgcgtgcaccccaaaaaatcacttgcgtttttgaggcttaaatcatctatccagtttctacattttgcatgaggcctgcaggtggcctattttgactcagacggtgaaaaaagcaaattaactcatttggacaccataactcatgcaataaaactgattgtcattcgaggagcaaacttaagagtagtttatttatataccctggggacagaaagtcaggttgaaacaggaaaaccaccagactctaatctcagccctttaacgacatacgcattggagcgcaagttaggaaaatgagcttttgttttcatggaaatcattctgattacagtgctgatgtttagaaataaatagcagtgtgactgggaaagaggaattgcagttgtgggggtgtgagcctggcagcagccagccagcagcctctcccaggcgggagtctaccatccgagacggcgatgacaaagagcttcattccacattctttgttatctctacttcccaccctcttggcaactacagagcagtgtgggcagccccaagtgtggtccccagagagcgtttggctttcctgtctgtctatcctgagcgggtggagtctcaggttgtgtgcccctaaatcaagatttgcttccacagaagccattacttgcaattttttttttttttctgagaaagtctcgctgtgtcacccaggctggagtgcagtggcgcaatctcactgcatcctccgcctcccgggttcaagcgattctcccgcctcagcctcctgagtagctgggattacaggcacccgccgctgctaatttttgtatttttagtagagatgggggtttcaccatattggtcaggctggtctcgaactcctgacctcaggtgatcaacccaccttggcctccctaaatgccgggattacaggcatgagccaccgctcccagcctttgattttttaaggtggattttggttgttataaatggagaaaggtaagagttcaagttcaacccgtgtgtgaaagcaaaacaatggaaaacaggattggcttcttcaaaggctcctcttgtagaactgcctctttgaaatttcgaggtaatctactttggagactctgcctggagagggtcagttcctaagttaaaagcatcgcttaaccttggctcctgtggcattttacaaaggtttaaaggaattgattcctctgaaagggcctgaaaataaaaagtctttaacatacaaaaaaaaaaaaaaa

SEQ ID NO: 2263 - DNA, 1890 bp, Homo sapiens
gtttgatgtatttcataatgaacggcgaaattggtgtttgcccattgacatttcagtgtcaatgtattttaagcttcagtgtgttaaaactctgttgaaaattttaacttttgaaatgttcaagtatagattatttttcattgttcttccaaccttggggttgttctgtccacaagttcagcagaatccgtttttctttggcaaccaagaaacttcaatatgtaacagaaaacatggaatggcatttagatcttcaaaaagcagggcaaactggaatggaatgtactgtttctcacagtggtctatgctgacagcaaggctgaagatttccagtaggttatgggtaatcagtgaaagttcatgcttggtggtgacagctgcagtacatcttgaataccagttttcttcaatctttgccaaaaacccaaatttaacacagtttgctgtagtgccattaagatatactcctatacaatttcctccaactcggttcatttgatacagctgcaaaaatactgtctttggtggtcaagtagaaggctcacgaaaacagcacacccacagttttgaaagccttattctgaatgtaagcaaagtacagttttcttcatcagtagattcatctcaaccaacagcaataaaagatgagccgatttttttttttttttgagatggagtcttgctctattgcccaggctggagtgcagtggctcagtctcggcttactgcaagctccgcctcccaggttcatgtcattctcctgcctcagcctcttgcgagctgatgttttttaagatctgaagtttgatatatacagtcattaattcagagttaagactgcagaagtagatgaagaaattctggaattccttaatttatttgtggcagcactcagaatgcaaggtttcacaagtgtctccatttttttctcctttgcaattaaaagggctgtttaatattaagctttcacggcttggaagattcctgtgaatatttcaatactgtccagtcttaaagctgcagagaatcgggctttgcagaacactccactgtttttaatggcatgaatttaacagtgtttggcatggtgtcactgcccaacactttcagataactcaactgaagaagttgaccctatcttctgcaaaataacatgagtatatacttgagaaaagcctcaacatttttttttggctgccatttttagctacctcaaaggagataacagaaaaacaaggagtactgatgatggaagcatctggtccctcttgcagagtgatgaatgattttattggtggcagctgggtggcaggacaatccaggcatccagttatgcctgatccccaataagtgaaatctttgttcattttctttttatacacccgtctgcttcctaaaacctgacaccatttaatggtgcccttggtcaaatctaaatgatcttactttcataattctttgattctaggctggcagagtcaagacgaactctaactcatgggatggacaaactggaagatgtaaaataagtaaggctttctgggccaaaaagcctcttcttacagaaaatcaaattttaaaagaacattgacctcaaaacaataaaactgtcctggttatgcaatagaaatagctatataaatggaatcatatccttaatgaacacctcctgtggctacccaacttttcacacatcttactgattataggccttgctgtgaatgctttcttgctctatctgaagtattcccaccagagttgtttccaactttatttcctatattatgaaaaatgaagtttttttaacattgtaacaaagtatatgaaagataatgtatactgtattaaataaaccattatacaaaaataaaaaaaaaaaaaaaaaaaaaa

SEQ ID NO: 2264 - DNA, 5345 bp, Homo sapiens; identical to SEQ ID NO: 2112

SEQ ID NO: 2265 - DNA, 2122 bp, Homo sapiens
  misc_feature (16)..(17): n is a, c, g, or t
  misc_feature (190)..(190): n is a, c, g, or t
  misc_feature (2100)..(2100): n is a, c, g, or t
ccgctttttttttttnnttttttttcgatttatcgttatttattatcaaaatcatgaccagtgtgtagacatacttgtgaaaatatacagcaacttggggcttataacacatgagcaaagatgacattaacacgtgcactgttcacatcttggggtctagaggtcaagaacaaagatcacagacaagacnttactaaacggacccctgcagtaggtcccgaattgcagaatcatccaattccagcatggtcagcacggagatattcacagaaagaaacccagcaaagtcctctctgagccgctagagtcaacaagcttttcatacacactatggagagcccacgccccacataacccttgagaacacagttccatgtcttggctaacacggctctcaccgctggcctcaacacccctgggccatgctccctctgctcttccatccccaccacaacgaagaaaggtatgaccgcacgttatatatagtaaagaagaactttgaggccgcaggacagggccgcagcagcaagctctctgggtagtgccttactgctccacccacctgagccctgttccaagtgcaaggagcttcccaaatcctagagaatgactgtacttagaaagttttgttttgtttaagagaaaatggctttacatgaatttatgttcctcatggcagatatgttacacttccctctaaacagaaagacaagcccaggtggggcccgggcatcctcgaggaatgaagcagccattcccaccacctctcagggactaacaggtgcatgtggacacttgaaccacgactgtgtccacagctcctcctggaccaggcctggtgcctgagtgtgaagactcctggcctgcgtggcaggggcagctatctgggagggctaaacagcctggaggctgagtctgcagaggaagggggacctgaaagagcccaggtacaggtgcccatcgtgttcgtgcacctcgctgatgtaggtggccaccagcccatcgggatcatgcaggcttctccggaaggcaccgctgtcgctgagttctaggacgaggctgtaccgcggcacaaacttcatcaccgtctcttgactaaagagcagatcacaaccagcgcagcttcccttaaaaatcatccttttaatccagggtctctcagataagaaatccagcatggaaaacccagggttagggcggatggtcgacatgcccacccagtaccccccagagctgctgggccggatgttgtctggaaatccaggcatgttctccacaaacagatcagccccgcccttcatcaggccagaaacgtagactcttcgtatcctggccatggttgtttctgccaccaggacaaagtcttctgcaggagacagctggactccattcgggaaccgcagctggtccaataaaacttttacttccctggtcacagtatcatactccagcaggcgcccgtcatctgtgccctccatcaccagaagcaggtagtctcgtctttgccatttgctgctagaatcggtgaaataaatcttcctcccatcctgagtgactgtaagatcattcacaaaggacatgttcttcccctcaatgggtgtctcggaggacagcagcagtttcacttcacgtttccagggatttacttcaaatagtcccttgtatgcatcggccacaaagagagtcccattgggccctgcacggatacccaggggtctcccacacacaggctcatcatctcgggttttgcaagggcccgaaccaaaccgggcaatggtctctatttcaccattttcaagttttacgacccggccatctgctgtcccagtaaacatcacatccccaatatgtgctatggactccggtccaacaagttgattttcaaacagcctttctgcctgtcgcagcttcgtatttggatgcagaacaccaagcaagagcgggggttctttgaagctgagaggctgtggatctataggagattccagcagcatcatggctccaagcaggggaacggtgagagaaacagccagcatcaagaaggtcactcggaaaactctgccgctaaaggagctgccgtccttagcctccggggcctgnccatcattgtatgtgacgacct

SEQ ID NO: 2266 - DNA, 1300 bp, Homo sapiens
ctgcagccggtgcagttacacgttttcctccaaggagcctcggacgttgtcacgggtttggggtcggggacagagcggtgaccatggccaggctggcgttgtctcctgtgcccagccactggatggtggcgttgctgctgctgctctcagctgagccagtaccagcagccagatcggaggaccggtaccggaatcccaaaggtagtgcttgttcgcggatctggcagagcccacgtttcatagccaggaaacggggcttcacggtgaaaatgcactgctacatgaacagcgcctccggcaatgtgagctggctctggaagcaggagatggacgagaatccccagcagctgaagctggaaaagggccgcatggaagagtcccagaacgaatctctcgccaccctcaccatccaaggcatccggtttgaggacaatggcatctacttctgtcagcagaagtgcaacaacacctcggaggtctaccagggctgcggcacagagctgcgagtcatgggattcagcaccttggcacagctgaagcagaggaacacgctgaaggatggtatcatcatgatccagacgctgctgatcatcctcttcatcatcgtgcctatcttcctgctgctggacaaggatgacagcaaggctggcatggaggaagatcacacctacgagggcctggacattgaccagacagccacctatgaggacatagtgacgctgcggacaggggaagtgaagtggtctgtaggtgagcacccaggccaggagtgagagccaggtcgccccatgacctgggtgcaggctccctggcctcagtgactgcttcggagctgcctggctcatggcccaacccctttcctggaccccccagctggcctctgaagctggcccaccagagctgccatttgtctccagcccctggtccccagctcttgccaaagggcctggagtagaaggacaacagggcagcaacttggagggagttctctggggatggacgggacccagccttctgggggtgctatgaggtgatccgtccccacacatgggatgggggaggcagagactggtccagagcccgcaaatggactcggagccgagggcctcccagcagagcttgggaagggccatggacccaactgggccccagaagagccacaggaacatcattcctctcccgcaaccactcccaccccagggaggccctggcctccagtgccttcccccgtggaataaacggtgtgtcctgagaaaccacaaaaaaaaaaaaaaaaaaaaaaaaaaaaaaaaaaaaaaaa

SEQ ID NO: 2267 - DNA, 4512 bp, Homo sapiens
tccgccgccggaggagcaggtggctgccgtgcgggtctgggccccaggcttcctgtgtgcgcgctcgtcctctgctgtttcccgccggagctcgttgggcctccccggcccgcccggcccatggcccagacccccgacggcatctcctgtgagctccgaggcgagatcaccaggttcctgtggcccaaagaggtggagctgctgctgaaaacctggctacccggggagggtgctgtgcaaaaccatgtcctggcactgctacgatggagagcctacctgctgcacaccacctgcctcccgctgagggtggactgcacgttcagctacctggaggtccaggccatggcgctgcaggagacaccccctcaggtcacctttgagctggagtccctgcgtgagctggtcctggagtttcctggtgtggccgccctggaacagctggcccagcacgtggctgcagccatcaagaaggtcttccctcgctcgacccttgggaagctattccggaggcccacaccagcctccatgctggctcggctggagagaagcagcccctcggagtccactgacccctgcagcccctgtggtggcttcttggagacatacgaggctctgtgtgactacaatggcttccctttccgagaggagattcagtgggacgtggacaccatttaccatcgccagggctgccgccatttcagcctgggagacttcagccacctcggcagtcgggacctggccttgagtgtggctgccctgtcctacaacctgtggttccggtgcctctcctgtgtggacatgaagctgagccttgaggtctcagaacagattctgcacatgatgagtcagtcatcacacctggaggagctggtgctggagacctgcagcctgaggggagactttgtccgacgactggcccaggcgctggcgggacactcaagctctgggctgcgggagctcagcctcgcggggaacctgctggatgaccgaggcatgactgcactcagcagacacctcgagcgttgtccaggagccctgaggagactcagcctggcccagacagggttgacaccgcgaggaatgagggctctgggccgggcactggccaccaatgccgccttcgactccaccctgacccacctggacctttctgggaatcctggggcgctgggggcctccgaggacagtgggggcctctatagcttcctgagccgtcctaacgtactgtcgttcctgaatctcgcaggcaccgacactgccctggacactgtgagggggtgctccgtggggggatggatgaccggcagggcggactggagggcgggacggggagggctcggtccccccgcgggtgtagccaacagcctccccccgcagctcttcgcagcggtatcccgaggctgctgcaccagccttacccacctcgacgcttcgaggaacgtcttctcccgcacgaagtcccgcgccgcgccggccgcgctgcagctcttcctcagccgcgcgcggacgctgcggcacctgggcctggcgggctgcaagctgccgcccgacgcgctcagagcccttttggatggcctcgcgctcaacacgcacctccgcgacctgcacctggacctcagcgcttgcgagctgcgctcggccggcgcccaggtgatacaagacttagtgtgcgacgcaggcgctgtgagctccctggatctggcggataacggcttcggctcagacatggtgactctggtgctggccatcgggagaagccggtccctgagacatgtggcgcttggaaggaacttcaacgtccggtgcaaggagaccctggacgacgtcctgcaccggattgtccagctcatgcaggacgacgattgtcctcttcagtctctgtcggtggctgagtctcggctgaagctgggtgccagcgtcctactccgggccctagccaccaatcctaacctgaccgcgctggatatcagcggcaacgccatgggggacgcgggcgccaagttgctggccaaggcgctgcgggtcaactcgaggctccggtctgtggtctgggaccggaaccacacatctgctttgggtctgctggacgtggcgcaggcgctggagcagaaccacagcctgaaggccatgcctctgccactgaacgacgtggcccaggcgcagcgcagccgcccggaactgacagcacgtgcagtccatcagatccaagcctgtctcttgaggaacaaccgcgcagaccctgcctcttctgaccacacgacccgccttcagccacttggtctggtctcagacccctcagagcaggaagtgaatgaattgtgtcagtcggtgcaggagcatgtggagctgctgggctgtggggctgggccccagggtgaagccgctgtgcgccaggccgaggatgccatccaaaatgccaacttctctctcagcattctccccattctatatgaagctggaagctccccaagccatcactggcagcttgggcagaagctggagggccttctgagacaggtgggcgaggtctgccgccaggacatccaggacttcactcaggccacactggacacagcaaggagcctctgcccacagatgctgcagggatccagctggagggagcagctagagggggtcctggcaggctcgaggggcctcccggagctgctcccagagcagctgctgcaagatgccttcactaggctcagggacatgcggctatcaatcacggggaccttggcagagagcattgtggctcaggctttggcaggcctgagtgcagcccgggatcagctggtggagagtctggctcagcaggcaacagtgacaatgccccctgccctaccagcaccggatggaggtgagcccagcctccttgagcctggggaattggaaggtcttttcttccccgaggagaaggaagaggagaaggagaaggatgacagtcctccacagaaatggcctgagctcagccacggtcttcacctggtccccttcattcacagtgctgctgaggaagcggagccggagcccgagctggcggctccgggagaagatgcagagccgcaggcggggccgtccgcgcgcggctctccgagccctgccgcccctgggcccccggccggcccgctgccccgcatggacctgccactggcggggcagcccctgcgccatccgacccgggcccggccgcggccgcgccgccagcaccaccaccgcccgccgccggggggcccccaggtacccccagccttgccgcaggaagggaatgggctcagtgcccgcgtggacgagggcgtggaggaattcttctccaaaaggctgatccagcaggatcgcctctgggcccccgaggaggacccggccactgaggggggcgccactcctgtcccccgtacactgcgaaagaagctgggcaccctctttgccttcaagaagcctcgttcaacgcggggtccacggactgatctagagaccagccctggggcagctccccgaacccgaaaaactacatttggcgacctactgcggccgccaacccgtcccagccgtggtgaggagcttggtggggctgagggggacaccagcagccctgaccctgccggcaggagccgacctcgctacacaagagatagcaaggcctactcgatgatactgctgcctgccgaggaggaggcaacgctgggtgccagacccgacaagcggcggcccctggagcggggagaaacagaactggctccatcctttgaacagcgggtacaagtaatgctgcagaggataggcgtcagccgaggcagcgggggtgccgaaggcaagaggaagcaaagcaaagatggcgagatcaagaaagctggctcagatggtgacattatggacagttccacggaggcccctcccatctcgatcaagtcccgcacccactctgtgtctgctgacccttcctgcagacctggcccagggagccaggggcctgagtctgccacctggaagacactggggcagcagttgaatgcggagctcaggagccgtggttggggccaacaggatggtccaggccctccctcccctggtcaaagcccaagtccctgcagaaccagcccctccccagacagcctgggcctcccagaggacccttgcttgggccccagaaatgaagatggccagctgaggccgaggcctctctcggcagggcggcgagcagtgtctgtgcatgaggaccagctccaggcccctgctgaacggcccctgaggctgcagcgctcccccgtcctcaaacgcaggccaaaactcgaggcacctccatccccaagcctaggatctggccttggaaccgagcctctgcccccacagcccacagagccctccagccctgagcggagcccaccctccccagccacagaccaaagaggcggcggccccaatccctgatcctctcctctcctgccgcatgagattattttattaaaaaactcaaaggaaaaaaaaaaaaaaaaaaaaaaaaaaaaaaaaaaa

SEQ ID NO: 2268 - DNA, 2148 bp, Homo sapiens
tttaggataaccattaaaacactacaaagacttcctgtttatggtaaggtaatgttgggatgaaatgaaacaacaaaaatccgaaaagcaagaaaaaagaggaaaaggaacataggcaagacaagatgagatgagagtgatgagactaaatgtttgggggctaaatctgccccaattacttgaaaaaaaaaaaactaaaagtaaaagtaaaaaccacattaaatctaaatggaccacattctctacttaaaaaaatgctattaaccatgtgatcttctcagtcatgaggtaatctggtgactacccttcctcaaagccagttgggatattctttgaatagagtaaaacagtgtttctaggctgggagacaccagacatagttgaggacagaggtgctagaaaataggaagtttaaaagcatgtgcggtgatgctcagaggaggtaaaccccaccctcatgctcatagcttccaatcattttctctagttcttaactcttaaatgtgagaaatgcttgaagattactagtcatctgaagaaagtctctttattaaagattttcataaaagagaccaaagcagacaaacagaaaaagacatcttggggaaaaaaacaaggataatgggaagagaaggaaagttttaaaaattatcaatatcctcagggggacaaaatattatatcctataaagacagatttttattttttaaaaaaatagaaagcaaaacaagctcctaaaaataaagtttgatagcagaaagaagaaaaagatgagttaagtcacctaaaaagagagcaaaggacaggagaaggaaaataaagaaaattagagagccaatccaagaggtacaacatcagaaaatataaatgtcagggaacaagaacagaaaaatggagggaagtgaatcctcaagacttcatgaacatttcccaaaactgaaagactcgtgttttcagataggaagcgcctactcactgaatgctaaacatgatgaattaaaataatgcacatcaaggcacagtgttatgaaattgtagaccgttaggtataaaaataaggatctggctgggcacagtggctcatgcctgtaatcccagcactttgggaggctgaggcaagaggattgcatgagtccagaagtttgaaaccagcctgggcaacatagtaaaaccctgtctctacaaaaaataaaaaaattagccaggtgcgatggtacatgcctgtaatcccagctactcaggaagctgaggtgggaggatcgcttgagtccagggaggttgaggttgcagtgagcttgtgccactgtactccagcctgagtgacagagcgagaccctgttgccaaaaaaattttttttttaaaagggatcctacatgcatccagagattaaacgaaaacaatcacctgaaaaggctctgaactcagattgatgcttctcaccagcactggaagctagatggtattggaataatacctcacagttctgaaggaaaaatatttccaagccagaattctaaacctagacaaactatcaaatataagtagaaagaagtaaacaaacacattttcagaaatgcaaaatttcaaaaaatatatatctcccatgcactgttcttcagaaagccttgggagaatgtaccctaccaaaagagggagtaataaactaggaaaagttgaatttgggaaatggaatcaacttagaaagaagcaaagaggcctgtaatgataaaggggttttctaggatgacagctccatagctggaatgggggacaaccagaccagaatggagctttagtagatatattctagagcaggaaattcgagaatatataaagtagctaaaatagaagaaaatgtagacaattgagtgagagttcaagggtgaaataacaatgttaaatactaaaaaatcaaagtaaaggaaaaaggacaattattaacttcaggaaagacaaagttatgcagaaaaggaaaagtaaccatgatataaacattgaatattgattgaaccacaattatgctctaactatattgggaagaagaaagaaagctgaaaatatgaaagagcgctaaatatttactcctacaggaaagagtcagtgatctccaaaacagaaaatgcaagatcagcacaataagagaaggc

SEQ ID NO: 2269 - DNA, 472 bp, Homo sapiens
ttaagaactgaaggtttaccatcttgatgtaggccttgccgtcctgaagagcactcgggctcatgtgtttcattcactcacatgttaaatatgaagccctatgtacaacatagcctgtgggaactgtggcaggggtagctgtctccatcctccagaaccttgtcacaatcaagaataggaaatgagacgcacaaatcactaccacctgtcgaagtggccttgcagtgctaaatctaagtgctgaggcaatttgcctgcagtccttgccacttcttgttgattagtccagcagcccccagctgggaggcaattctgttcaccctcactcccacctcaggacatctggcaatgtctggaaacagttggttgtcaccacttggggaaaggggagtgtgcttttggcaggtagaggcctgggaggctgctccacatcctacagtgcacagaacagtctccccaaccaagaataatc

SEQ ID NO: 2270 - DNA, 2162 bp, Homo sapiens
gcggacgtgagcgataatggcggatatggaggatctcttcgggagcgacgccgacagcgaagctgagcgtaaagattctgattctggatctgactcagattctgatcaagagaatgctgcctctggcagtaatgcctctggaagtgaaagtgatcaggatgaaagaggtgattcaggacaaccaagtaataaggaactgtttggagatgacagtgaggacgagggagcttcacatcatagtggtagtgataatcactctgaaagatcagacaatagatcagaagcttctgagcgttctgaccatgaggacaatgacccctcagatgtagatcagcacagtggatcagaagcccctaatgatgatgaagacgaaggtcatagatcggatggagggagccatcattcagaagcagaaggttctgaaaaagcacattcagatgatgaaaaatggggcagagaagataaaagtgaccagtcagatgatgaaaagatacaaaattctgatgatgaggagagggcacaaggatctgatgaagataagctgcagaattctgacgatgatgagaaaatgcagaacacagatgatgaggagaggcctcagctttccgatgatgagagacaacagctatctgaggaggaaaaggctaattctgatgatgaacggccggtagcttctgataatgatgatgagaaacagaattctgatgatgaagaacaaccacagctgtctgatgaagagaaaatgcaaaattctgatgatgaaaggccacaggcctcagatgaagaacacaggcattcagatgatgaagaggaacaggatcataaatcagaatctgcaagaggcagtgatagtgaagatgaagttttacgaatgaaacgcaagaatgcgattgcatctgattcagaagcggatagtgacactgaggtgccaaaagataatagtggaaccatggatttatttggaggtgcagatgatatctcttcagggagtgatggagaagacaaaccacctactccaggacagcctgttgatgaaaatggattgcctcaggatcaacaggaagaggagccaattcctgagaccagaatagaagtagaaatacccaaagtaaacactgatttaggaaacgacttatattttgttaaactgcccaactttctcagtgtagagcccagaccttttgatcctcagtattatgaagatgaatttgaagatgaagaaatgctggatgaagaaggtagaaccaggttaaaattaaaggtagaaaatactataagatggaggatacgccgagatgaagaaggaaatgaaattaaagaaagcaatgctcggatagtcaagtggtcagatggaagcatgtccctgcatttaggcaatgaagtgtttgatgtgtacaaagccccactgcagggcgaccacaatcatctttttataagacaaggtactggtctacagggacaagcagtctttaaaacgaaactcaccttcagacctcactctacggacagtgccacacatagaaagatgactctgtcacttgcagataggtgttcaaagacacagaagattagaatcttgccaatggctggtcgtgatcctgaatgccaacgcacagaaatgattaagaaagaagaagaacgtttgagggcttccatacgtagggaatctcagcagcgccgaatgagagagaaacagcaccagcgggggctgagcgccagttacctggaacctgatcgatacgatgaggaggaggaaggcgaggagtccatcagcttggctgccattaaaaaccgatataaagggggcattcgagaggaacgagccagaatctattcatcagacagtgatgagggatcagaagaagataaagctcaaagattactcaaagcaaagaaacttaccagtgatgaggaaggtgaaccttccggaaagagaaaagcagaagatgatgataaagcaaataaaaagcataagaagtatgtgatcagcgatgaagaggaagaagatgatgattgaagtatgaaatatgaaaacattttatatattttattgtacagttataaatatgtaaacatgagttattttgattgaaatgaatcgatttgcttttgtgtaattttaattgtaataaaacaatttaaaagcaaaaaaaaaaaaaaaa

SEQ ID NO: 2271 - DNA, 729 bp, Homo sapiens
atgccaagctgtgccggccttctaccccatctccactattttgccctccgccgccgcggctttttgccccccccccccgcccctccccggctttttactctccgagacttttcgccccccgtcgccgcggcattttgccacccgccaccgtggctttttgctgcccgccgccgcggctttttccccaccgcggctttttaccgcccgtcgccgcggctttttgcccacccgccgccgcggctttttgcccccaccgctcctcggcgttttgcccgccgcggctttttgcgtccccgccgccgtggctttttaccacccccccccacgagtcagccccagtcaggacacagcacagaagtgagggcccccactcagctcctggggctcctggtgctctggctgccaggtgccagatgtgacatccagatgacccagtctccatcctccctgtctgcatctgtaggagacagagtcaccatcacttgccgggcgagtcagggcattagcaataatttaaattggtatcagcagaaaccagggaaaactcctaagctcctgatctatgctgcatccagtctgcaaagtgggattccctctcggttcagtgacagtggatctgggacagattacactctcaccatcagcagcctgcagcctgaagattttgcaacttattactgtcaacagagtgacagtacctctcccacagtgttacaagtcataacataa

SEQ ID NO: 2272 - DNA, 1940 bp, Homo sapiens
gcggtcctcgtcgcgaccggcccgggccgcaggacgccgcgctcgggggagctgagccacctctccgccaggcccgtgcgagcggtacaaagaaaagagcacttccctgctggggcagaggccaagccagagccctggccccatcacctctctgccctgcttgagtctggaatggacctccctgcctggaagctgcattgcccttggtcctgggcctgcctgccccctggggaacacaggcagcagccacattggcagtgaagccgtggcagcgtcggcagcagaggatgccccaggccctggagcgtgcagatggcagctgggcctgggtggtgctgctggccaccatggtgacccagggcctcaccctgggcttccccacgtgtatcggcatcttcttcactgaactgcaatgggagttccaggccagcaacagcgagacctcttggttcccctccatcctcacggctgtgctccacatggcagggcccctgtgcagcatcctggtgggacgcttcggctgccgagtgaccgtgatgctggggggcgtgctggccagcctgggcatggtggccagctccttctctcacaacctcagccagctctacttcacagcaggattcatcacaggcctgggcatgtgcttcagcttccagtcaagcatcacggtgctgggcttctactttgtccgccggcgggtgctggccaacgcgctggcctcgatgggcgtctccctgggcatcaccctctggccgctgctctcccgctaccttctggagaacctgggctggaggggtaccttccttgtcttcggcgggatctttctccactgctgcatctgcggggccatcataaggcctgtggccaccagtgtggcccctgagaccaaagaatgtcccccgccacctcccgagacacctgcacttggctgcctggctgcatgcggccggaccatccagcgccacctggccttcgacatcctgcggcacaacacaggctactgcgtgtacatactgggtgtgatgtggtccgtcctgggcttcccactgccacaagtcttcctggtgccatatgccatgtggcacagcgtggacgagcagcaggcagccctcctcatctccatcatcggcttcagcaacatcttcctgaggcccctagccgggctgatggcaggacggccggcctttgctagccaccgcaagtacctgttcagcctggcactcctgctcaatgggctcactaacctggtgtgtgcggcatcaggtgacttctgggtgctcgtgggctactgcctggcgtacagcgtgtccatgagtggcatcggcgccctcatcttccaggttctcatggacatcgtccccatggatcagttccccagagccctgggactcttcactgtcctggacggccttgctttcctcatctccccaccactggccgggttgctcctggacgccaccaacaactttagctatgttttctacatgtccagcttcttcctcatctcagctgccctcttcatgggtggcagcttctacgccctgcagaagaaggagcaaggcaagcaggctgtcgcggcggatgccctggagcgggatcttttcttggaagccaaagacggtcctgggaagcaacggtcccctgagatcatgtgccagtcttcccgccagccacgtccagctggcgtcaataagcatctttggggatgtcctgcctcctccaggaccagccatgagtggctcttatggccaaaggcggtactgcaggccaagcaaacggctctgggctggaatagccctacctgagtgccctgtttgactccgccactatctgccatgtgagttgggcaaattgttgaccacctctgagccttgaaaaagtaggaggttactttgttagagcaaaataataaaatttaattttaaaaaaaaaaaaaaaaa

SEQ ID NO: 2273 - DNA, 1058 bp, Homo sapiens
aagccaactttcctttcaaatacacaccccaacccgccccggcatacacagaaatggggactgcgagcagaagcaacatcgctcgccatctgcaaaccaatctcattctattttgtgtcggtgctgtgggcgcctgtactctctctgtcacacaaccgtggtacctagaagtggactacactcatgaggccgtcaccataaagtgtaccttctccgcaaccggatgcccttctgagcaaccaacatgcctgtggtttcgctacggtgctcaccagcctgagaacctgtgcttggacgggtgcaaaagtgaggcagacaagttcacagtgagggaggccctcaaagaaaaccaagtttccctcactgtaaacagagtgacttcaaatgacagtgcaatttacatctgtggaatagcattccccagtgtgccggaagcgagagctaaacagacaggaggagggaccacactggtggtaagagaaattaagctgctcagcaaggaactgcggagcttcctgacagctcttgtatcactgctctctgtctatgtgaccggtgtgtgcgtggccttcatactcctctccaaatcaaaatccaaccctctaagaaacaaagaaataaaagaagactcacaaaagaagaagagtgctcggcgtatttttcaggaaattgctcaagaactataccataagagacatgtggaaacaaatcagcaatctgagaaagataacaacacttatgaaaacagaagagtactttccaactatgaaaggccatagaaacgttttaattttcaatgaagtcactgaaaatccaactccaggagctatggcagtgttaatgaacatatatcatcaggtcttaaaaaaaaataaaggtaaactgaaaagacaactggctacaaagaaggatgtcagaatgtaaggaaactataactaatagtcattaccaaaatactaaaacccaacaaaatgcaactgaaaaataccttccaaatttgccaagaaaaaaaattctattttaaacttaaaaaaaaaaaaaaaaaaaaaaaaaaaaaa

SEQ ID NO: 2274 - DNA, 3687 bp, Homo sapiens
gtttccgggcgggcctccagaggccggcgcacaagatggcggctctggcggcctaaagaaggcggccgcggctcagccgtgggctctaacgcggggctgggggccggagacagacttcgcccaggtgacgggtagtaggggcggcgccgcttggcctcgtggggtgtaagacccacttgctgttgcccccggaccttgccgccacaccagccctgtcctggggcggaaccgaaggaaggtcgggccctgctgccccgccccgtccttcctccttcccgggcggtcactgtgcgtggctcacttttagagtttacttcaaccacgtggagcttccatggcggcctctcaggtcctgggggagaagattaacatcctgtcgggagagactgtcaaagctggggacagggacccgctggggaacgactgtcccgagcaagataggctcccccagcgctcctggaggcagaagtgtgcctcctacgtgttggccctgaggccctggagcttcagtgcctcactcacaccggtggccctgggcagtgcccttgcctacagatcccacggtgtcctggatcccaggctcttggtgggttgtgccgtggctgtcctggctgtgcacggggccggtaatttggtcaacacttactatgacttttccaagggcattgaccacaaaaagagtgatgacaggacacttgtggaccgaatcttggagccgcaggatgtcgtccggttcggagtcttcctctacacgttgggctgcgtctgtgccgcttgcctctactacctgtcccctctgaaactggagcacttggctcttatctactttggaggcctgtctggctcctttctctacacaggaggaattggattcaagtacgtggctctgggagacctcatcatcctcatcacttttggcccgctggctgtgatgttcgcctacgccatccaggtggggtccctggccatcttcccactggtctatgccatccccctcgccctcagcaccgaggccattctccattccaacaacaccagggacatggagtccgaccgggaggctggtatcgtcacgctggccatcctcatcggccccacgttctcctacattctctacaacacactgctcttcctgccctacctggtcttcagcatcctggccacacactgcaccatcagcctggcactccccctgcttaccattcccatggccttctcccttgagagacagtttcgaagccaggccttcaacaaactgccccagaggactgccaagctcaacctcctgctgggacttttctatgtctttggcatcattctggcaccagcaggcagtctgcccaaaatttaaggggacaagtagctccccccacgacatgtctccctttcttagaatatattaaagtcagagtctctgaggaaggaatgtgatttggcagtcagggtactaagcatgggtgggaactcctgccttataaaaattgtttttgtgttcttaaagataatatgttgtttttctgttttttgttttttccattttatggggaatttaaaaaccattcttgtatcagaaggtgaattaggcgcatggtctttgttttattaataatttccactagagggtgttctcaggtcactttgcagtgaagtggacttagttcctccttgttctgtacaaaatgtctccagactttgtaaaggagctgcccagtttggcctcctgtcccgaaaagaccctaataactaggcagagtgttgtcctgctttcttcgtctcgtaggatgtgctatgattggtgccaggcctcactaacacaggggctacctgtctcttattctcagcacctgtgtcctgagatacgctgcctgagacagagagagtccctcattaacagcctgtgtggctgtcagctttttgcctaaattgtgattcagatgcttttgttctctctcctttcacttattgccacagttgaggaaaagtgtcagattaccctgcagcaagacaagccaaggactgggagggaaaaaaaaaccactctggaggcaactgagaaaatcactgcttttggataggaatcagtagggtggctgttttccctttgttgaatctactagagtgacaggaaggactcccagccctttcagtaactatcaggagccctgaaacggtagaggcactgccatccttgtgggatactcaaagcccacagggcttttccctccctattgcatcttctgatgctccccacacctaccctccacctctccacctctgtggtgttcccatttgtgtgtttcccatctgtggagccagactgagcaatagcttagcagcgagtcagggacagctgccactttccacagagccacaggatgggcagagcagggacccagggaatgaatagccagtggacaaacagtcttgagctctgttcagccagagtgatgggccctgccagttaaggggctgtgtcttcatccttgaagacagatgtgcaatattgaccctgcctctccccagggctttgtggaaagatagttgagggctttagtgagatcacactcagagtggggcaattccagcatttatcctggctgcgtttcattgcattgtctgtgaagtataatttctgggccagaattgctcagttgcatttgatccaggactatagattggaaatgggtcatcattgttttctgttgtgattatagccattctagtaggcgtttaaggtcatggcctgcagaaaatgatgtaagaactagttcttaatctttcagatcaagctaatgatgatatggaaccttgagttcgaattgattggtttacttggaaaaaaacatgtttgaaaattgcaaaagttccgccgggcgcggtggctcatgcctgtaatcccagcactttgggaggccgagacgggcggatcacgaggtcaggagatcgagaccatcttggctaacacggtgaaaccccgtttctactaaaaatacaaaaaattagccaggcgtgttggcgggcgcctgtagtcccagctacctgggcggctgaggcaggagcatggcgtgaacccaggaggcggagcttgcagtgagctgagatcatgccactgcactccaacctgggggacacagcaagactccgtctcaaaaaaaaaaaaagaaaaagaaaattgcaaaagttcctctaaagttaaatcaaaggtggtttgtctagcagagagccagaatcttctaatagtgggcagagcccagagacaaggggaagaaagatgaccttctccccagtccttcccagcaccatttttgtttcacaccaggcttgtggcattttggtgctcacaggggttttgccttctgacctctccttggagtaggccattctcatgcagggctcaccctgaggcaggaggaccaagggctccctgcgtccacggaccacgtatgccttggtggtcactcccatcggggctatcagttctgcactgtgccctggtgcggattttaatgcatatttttatatataaatgttcccaaaggccaaatttgttgccaggttttatacgcaggtcaccataatttgtattatgttccctgagtcaatgaaggttttctttagacttcttaattaaaaagagaagaaagaaaatgttcaaaaaaaaaaaaaaaaaaaaaaaaaaaaaaaaaa

SEQ ID NO: 2275 - DNA, 2828 bp, Homo sapiens
tcatttgcttaaatttgcagctgacggctgccacctctctagaggcacctggcggggagcctctcaacataagacagtgaccagtctggtgactcacagccggcacagccatgaactacccgctaacgctggaaatggacctcgagaacctggaggacctgttctgggaactggacagattggacaactataacgacacctccctggtggaaaatcatctctgccctgccacagaggggcccctcatggcctccttcaaggccgtgttcgtgcccgtggcctacagcctcatcttcctcctgggcgtgatcggcaacgtcctggtgctggtgatcctggagcggcaccggcagacacgcagttccacggagaccttcctgttccacctggccgtggccgacctcctgctggtcttcatcttgccctttgccgtggccgagggctctgtgggctgggtcctggggaccttcctctgcaaaactgtgattgccctgcacaaagtcaacttctactgcagcagcctgctcctggcctgcatcgccgtggaccgctacctggccattgtccacgccgtccatgcctaccgccaccgccgcctcctctccatccacatcacctgtgggaccatctggctggtgggcttcctccttgccttgccagagattctcttcgccaaagtcagccaaggccatcacaacaactccctgccacgttgcaccttctcccaagagaaccaagcagaaacgcatgcctggttcacctcccgattcctctaccatgtggcgggattcctgctgcccatgctggtgatgggctggtgctacgtgggggtagtgcacaggttgcgccaggcccagcggcgccctcagcggcagaaggcagtcagggtggccatcctggtgacaagcatcttcttcctctgctggtcaccctaccacatcgtcatcttcctggacaccctggcgaggctgaaggccgtggacaatacctgcaagctgaatggctctctccccgtggccatcaccatgtgtgagttcctgggcctggcccactgctgcctcaaccccatgctctacactttcgccggcgtgaagttccgcagtgacctgtcgcggctcctgacgaagctgggctgtaccggccctgcctccctgtgccagctcttccctagctggcgcaggagcagtctctctgagtcagagaatgccacctctctcaccacgttctaggtcccagtgtccccttttattgctgcttttccttggggcaggcagtgatgctggatgctccttccaacaggagctgggatcctaagggctcaccgtggctaagagtgtcctaggagtatcctcatttggggtagctagaggaaccaacccccatttctagaacatccctgccagctcttctgccggccctggggctaggctggagcccagggagcggaaagcagctcaaaggcacagtgaaggctgtccttacccatctgcacccccctgggctgagagaacctcacgcacctcccatcctaatcatccaatgctcaagaaacaacttctacttctgcccttgccaacggagagcgcctgcccctcccagaacacactccatcagcttaggggctgctgacctccacagcttcccctctctcctcctgcccacctgtcaaacaaagccagaagctgagcaccaggggatgagtggaggttaaggctgaggaaaggccagctggcagcagagtgtggccttcggacaactcagtccctaaaaacacagacattctgccaggcccccaagcctgcagtcatcttgaccaagcaggaagctcagactggttgagttcaggtagctgcccctggctctgaccgaaacagcgctgggtccaccccatgtcaccggatcctgggtggtctgcaggcagggctgactctaggtgcccttggaggccagccagtgacctgaggaagcgtgaaggccgagaagcaagaaagaaacccgacagagggaagaaaagagctttcttcccgaaccccaaggagggagatggatcaatcaaacccggcggtcccctccgccaggcgagatggggtggggtggagaactcctagggtggctgggtccaggggatgggaggttgtgggcattgatggggaaggaggctggcttgtcccctcctcactcccttcccataagctatagacccgaggaaactcagagtcggaacggagaaaggtggactggaaggggcccgtgggagtcatctcaaccatcccctccgtggcatcaccttaggcagggaagtgtaagaaacacactgaggcagggaagtccccaggccccaggaagccgtgccctgcccccgtgaggatgtcactcagatggaaccgcaggaagctgctccgtgcttgtttgctcacctggggtgtgggaggcccgtccggcagttctgggtgctccctaccacctccccagcctttgatcaggtggggagtcagggacccctgcccttgtcccactcaagccaagcagccaagctccttgggaggccccactggggaaataacagctgtggctcacgtgagagtgtcttcacggcaggacaacgaggaagccctaagacgtcccttttttctctgagtatctcctcgcaagctgggtaatcgatgggggagtctgaagcagatgcaaagaggcaagaggctggattttgaattttctttttaataaaaaggcacctataaaacaggtcaatacagtacaggcagcacagagacccccggaacaagcctaaaaattgtttcaaaataaaaaccaagaagatgtcttca

SEQ ID NO: 2276 - DNA, 5345 bp, Homo sapiens; identical to SEQ ID NO: 2112

SEQ ID NO: 2277 - DNA, 5490 bp, Homo sapiens
ggctgagttttatgacgggcccggtgctgaagggcagggaacaacttgatggtgctactttgaactgcttttcttttctcctttttgcacaaagagtctcatgtctgatatttagacatgatgagctttgtgcaaaaggggagctggctacttctcgctctgcttcatcccactattattttggcacaacaggaagctgttgaaggaggatgttcccatcttggtcagtcctatgcggatagagatgtctggaagccagaaccatgccaaatatgtgtctgtgactcaggatccgttctctgcgatgacataatatgtgacgatcaagaattagactgccccaacccagaaattccatttggagaatgttgtgcagtttgcccacagcctccaactgctcctactcgccctcctaatggtcaaggacctcaaggccccaagggagatccaggccctcctggtattcctgggagaaatggtgaccctggtattccaggacaaccagggtcccctggttctcctggcccccctggaatctgtgaatcatgccctactggtcctcagaactattctccccagtatgattcatatgatgtcaagtctggagtagcagtaggaggactcgcaggctatcctggaccagctggccccccaggccctcccggtccccctggtacatctggtcatcctggttcccctggatctccaggataccaaggaccccctggtgaacctgggcaagctggtccttcaggccctccaggacctcctggtgctataggtccatctggtcctgctggaaaagatggagaatcaggtagacccggacgacctggagagcgaggattgcctggacctccaggtatcaaaggtccagctgggatacctggattccctggtatgaaaggacacagaggcttcgatggacgaaatggagaaaagggtgaaacaggtgctcctggattaaagggtgaaaatggtcttccaggcgaaaatggagctcctggacccatgggtccaagaggggctcctggtgagcgaggacggccaggacttcctggggctgcaggtgctcggggtaatgacggtgctcgaggcagtgatggtcaaccaggccctcctggtcctcctggaactgccggattccctggatcccctggtgctaagggtgaagttggacctgcagggtctcctggttcaaatggtgcccctggacaaagaggagaacctggacctcagggacacgctggtgctcaaggtcctcctggccctcctgggattaatggtagtcctggtggtaaaggcgaaatgggtcccgctggcattcctggagctcctggactgatgggagcccggggtcctccaggaccagccggtgctaatggtgctcctggactgcgaggtggtgcaggtgagcctggtaagaatggtgccaaaggagagcccggaccacgtggtgaacgcggtgaggctggtattccaggtgttccaggagctaaaggcgaagatggcaaggatggatcacctggagaacctggtgcaaatgggcttccaggagctgcaggagaaaggggtgcccctgggttccgaggacctgctggaccaaatggcatcccaggagaaaagggtcctgctggagagcgtggtgctccaggccctgcagggcccagaggagctgctggagaacctggcagagatggcgtccctggaggtccaggaatgaggggcatgcccggaagtccaggaggaccaggaagtgatgggaaaccagggcctcccggaagtcaaggagaaagtggtcgaccaggtcctcctgggccatctggtccccgaggtcagcctggtgtcatgggcttccccggtcctaaaggaaatgatggtgctcctggtaagaatggagaacgaggtggccctggaggacctggccctcagggtcctcctggaaagaatggtgaaactggacctcagggacccccagggcctactgggcctggtggtgacaaaggagacacaggaccccctggtccacaaggattacaaggcttgcctggtacaggtggtcctccaggagaaaatggaaaacctggggaaccaggtccaaagggtgatgccggtgcacctggagctccaggaggcaagggtgatgctggtgcccctggtgaacgtggacctcctggattggcaggggccccaggacttagaggtggagctggtccccctggtcccgaaggaggaaagggtgctgctggtcctcctgggccacctggtgctgctggtactcctggtctgcaaggaatgcctggagaaagaggaggtcttggaagtcctggtccaaagggtgacaagggtgaaccaggcggtccaggtgctgatggtgtcccagggaaagatggcccaaggggtcctactggtcctattggtcctcctggcccagctggccagcctggagataagggtgaaggtggtgcccccggacttccaggtatagctggacctcgtggtagccctggtgagagaggtgaaactggccctccaggacctgctggtttccctggtgctcctggacagaatggtgaacctggtggtaaaggagaaagaggggctccgggtgagaaaggtgaaggaggccctcctggagttgcaggaccccctggaggttctggacctgctggtcctcctggtccccaaggtgtcaaaggtgaacgtggcagtcctggtggacctggtgctgctggcttccctggtgctcgtggtcttcctggtcctcctggtagtaatggtaacccaggacccccaggtcccagcggttctccaggcaaggatgggcccccaggtcctgcgggtaacactggtgctcctggcagccctggagtgtctggaccaaaaggtgatgctggccaaccaggagagaagggatcgcctggtgcccagggcccaccaggagctccaggcccacttgggattgctgggatcactggagcacggggtcttgcaggaccaccaggcatgccaggtcctaggggaagccctggccctcagggtgtcaagggtgaaagtgggaaaccaggagctaacggtctcagtggagaacgtggtccccctggaccccagggtcttcctggtctggctggtacagctggtgaacctggaagagatggaaaccctggatcagatggtcttccaggccgagatggatctcctggtggcaagggtgatcgtggtgaaaatggctctcctggtgcccctggcgctcctggtcatccaggcccacctggtcctgtcggtccagctggaaagagtggtgacagaggagaaagtggccctgctggccctgctggtgctcccggtcctgctggttcccgaggtgctcctggtcctcaaggcccacgtggtgacaaaggtgaaacaggtgaacgtggagctgctggcatcaaaggacatcgaggattccctggtaatccaggtgccccaggttctccaggccctgctggtcagcagggtgcaatcggcagtccaggacctgcaggccccagaggacctgttggacccagtggacctcctggcaaagatggaaccagtggacatccaggtcccattggaccaccagggcctcgaggtaacagaggtgaaagaggatctgagggctccccaggccacccagggcaaccaggccctcctggacctcctggtgcccctggtccttgctgtggtggtgttggagccgctgccattgctgggattggaggtgaaaaagctggcggttttgccccgtattatggagatgaaccaatggatttcaaaatcaacaccgatgagattatgacttcactcaagtctgttaatggacaaatagaaagcctcattagtcctgatggttctcgtaaaaaccccgctagaaactgcagagacctgaaattctgccatcctgaactcaagagtggagaatactgggttgaccctaaccaaggatgcaaattggatgctatcaaggtattctgtaatatggaaactggggaaacatgcataagtgccaatcctttgaatgttccacggaaacactggtggacagattctagtgctgagaagaaacacgtttggtttggagagtccatggatggtggttttcagtttagctacggcaatcctgaacttcctgaagatgtccttgatgtgcagctggcattccttcgacttctctccagccgagcttcccagaacatcacatatcactgcaaaaatagcattgcatacatggatcaggccagtggaaatgtaaagaaggccctgaagctgatggggtcaaatgaaggtgaattcaaggctgaaggaaatagcaaattcacctacacagttctggaggatggttgcacgaaacacactggggaatggagcaaaacagtctttgaatatcgaacacgcaaggctgtgagactacctattgtagatattgcaccctatgacattggtggtcctgatcaagaatttggtgtggacgttggccctgtttgctttttataaaccaaactctatctgaaatcccaacaaaaaaaatttaactccatatgtgttcctcttgttctaatcttgtcaaccagtgcaagtgaccgacaaaattccagttatttatttccaaaatgtttggaaacagtataatttgacaaagaaaaatgatacttctctttttttgctgttccaccaaatacaattcaaatgctttttgttttatttttttaccaattccaatttcaaaatgtctcaatggtgctataataaataaacttcaacactctttatgataacaacactgtgttatattctttgaatcctagcccatctgcagagcaatgactgtgctcaccagtaaaagataacctttctttctgaaatagtcaaatacgaaattagaaaagccctccctattttaactacctcaactggtcagaaacacagattgtattctatgagtcccagaagatgaaaaaaattttatacgttgataaaacttataaatttcattgattaatctcctggaagattggtttaaaaagaaaagtgtaatgcaagaatttaaagaaatatttttaaagccacaattattttaatattggatatcaactgcttgtaaaggtgctcctcttttttcttgtcattgctggtcaagattactaatatttgggaaggctttaaagacgcatgttatggtgctaatgtactttcacttttaaactctagatcagaattgttgacttgcattcagaacataaatgcacaaaatctgtacatgtctcccatcagaaagattcattggcatgccacaggggattctcctccttcatcctgtaaaggtcaacaataaaaaccaaattatggggctgcttttgtcacactagcatagagaatgtgttgaaatttaactttgtaagcttgtatgtggttgttgatcttttttttccttacagacacccataataaaatatcatattaaaattc

SEQ ID NO: 2278 - DNA, 7730 bp, Homo sapiens
gtcggctgacgtggagggccggaggtggcggcggcggcggcggcggctgctgctgctgctgcccgcgtccgaggctcgcgggcggcgggcccggacttgtgcaccatggacaattttgctgagggagatttcactgtggcggattatgccttgttagaagattgccctcacgtggatgattgtgtctttgctgctgaatttatgagcaatgattatgttcgtgtgactcagctttactgtgatggggtgggtgtgcaatataaagattatatccaaagtgagaggaatttggaatttgacatctgcagtatatggtgtagtaaaccaatttctgtcctgcaagattattgcgatgccattaaaataaacatcttctggccacttctgtttcaacatcaaaacagttccgtaatatcacgattgcatccctgtgtggacgccaacaattcacgtgcttctgagataaatttgaagaaactacaacatcttgagttgatggaagatattgtggatttggcaaagaaagttgctaatgattcattccttattggaggcttattgagaattggttgtaaaatagaaaataaaatcttggcaatggaagaagctctgaattggataaaatatgcaggcgatgtaacaattctaactaaattaggatcaattgacaattgttggcctatgttaagtattttctttactgaatacaagtaccacataactaaaattgtaatggaagactgcaatttgcttgaagaacttaaaactcaaagttgtatggattgtatagaggaaggagaactaatgaaaatgaaaggaaatgaagagttttccaaagaaagatttgatatagctattatctattacaccagagccattgaatatagacctgaaaactaccttctttatggtaaccgagctctttgttttcttcgtactggacagtttagaaatgcactcggtgatggaaagagagccactattctgaagaacacttggccaaagggtcattatcgttattgtgatgctctttctatgctgggggaatatgactgggccctgcaagcaaacataaaagctcaaaaactctgtaaaaatgaccctgagggaatcaaggatctaattcagcagcatgtaaagttacaaaaacaaatagaagacctacaaggtcgaacagcaaataaggatccaattaaagccttttatgaaaacagggcctacacacctaggagtttatcagcacctatatttactacttcacttaactttgtggagaaggaaagagatttcagaaaaattaatcacgaaatggccaacggtggtaatcagaatctaaaggtggcggatgaggcgttgaaggtagatgattgtgactgtcatcctgaattttcaccaccatcaagtcagcctccaaaacataaaggaaaacaaaaatctcgaaacaatgaatcagaaaagttcagttctagttcaccattgactttaccagcagatttgaagaacatcttggagaaacagttttctaaatcttccagagctgcacaccaggattttgctaatataatgaaaatgctgagaagcttaattcaagatggctatatggccttattggagcagcgttgccgcagcgctgcacaggcctttacagagttgctgaacggtttagatcctcaaaaaataaagcaattgaacctggccatgattaactatgttttggtcgtctatggacttgccatttctctccttggaataggacagcctgaggaattatctgaagccgaaaaccagtttaagaggattattgaacactaccccagtgagggccttgattgcttggcctactgtggaattggaaaagtatatttgaaaaaaaacagatttctagaagctctcaatcactttgagaaagcaagaaccttgatttatcgtcttcctggagtgttaacttggcccacgagtaatgtgattattgaagagtctcagccacaaaaaataaagatgctgttagagaaatttgttgaagaatgcaagttccctccagtgccagatgccatttgttgctatcagaagtgccatggatattctaagatccagatatacataactgatccagactttaagggttttatacgcatcagctgttgccagtactgtaaaatagaatttcacatgaattgctggaagaagttaaaaactacaacctttaatgataaaattgacaaggattttctacaaggaatatgtcttacccctgactgtgaaggtgtcatttctaagattatcatcttcagcagtggtggtgaagttaaatgtgaatttgaacacaaggtcataaaagaaaaggttcctccaagacctattctgaaacagaaatgttctagcctagagaaactaagactgaaagaagacaaaaaattgaagagaaagatccaaaaaaaagaagcaaaaaagttagcacaagaaagaatggaggaggacttaagagaaagtaatccacccaaaaatgaagagcagaaagaaactgtagacaatgttcagcgttgtcagttccttgatgacagaattctacagtgtataaagcagtatgctgacaagattaaatccggcatacagaatacagccatgcttctcaaagaattgctttcttggaaagttttgagcacagaagactatacaacctgtttttctagcagaaattttctaaatgaagcagtggactatgttattcgccacttgattcaagaaaataacagagtaaagacaagaatatttctgcatgttttgagtgagcttaaagaagtggagcccaaattagccgcctggatccaaaaacttaatagctttggcttagatgccacaggaactttcttttctcgttatggagcatctcttaaactgcttgattttagtatcatgactttcctctggaatgagaaatatggtcacaaactagactctatagaaggaaagcaacttgattatttctctgagccagcatcattgaaggaagcccgttgtttaatatggctgctagaagaacacagagacaagttcccagcattgcatagtgctttagatgaattctttgatataatggacagccgctgtactgtgttaaggaaacaagatagtggtgaagcaccgtttagttcaaccaaggtgaaaaacaaaagcaagaaaaagaagccaaaggattcaaagcctatgttagttgggtctggaacaacttcagtaacttcaaataatgagatcatcacttcaagtgaagaccatagcaatcgaaattcagattctgcaggcccatttgcagtgcctgaccatcttcggcaagatgtagaagaattcgaagctctctatgaccaacacagtaacgaatatgttgtccgcaataagaagctatgggacatgaacccaaaacaaaaatgttcaactctatatgattacttctctcagtttttggaggaacatggtcccttggacatgagtaacaagatgttctctgcagaatatgagtttttcccagaagaaactcgacagatactagaaaaagcaggaggtttaaaaccttttctcttgggatgccctcgttttgttgtgattgacaactgtattgcactgaagaaggttgcatcacggctcaagaaaaaaaggaagaagaaaaacattaaaacaaaagtagaagaaatttcaaaagcaggggagtatgtacgagttaaactacaactgaatccagctgctagggaatttaaaccagatgtaaagtctaaaccagtgtcagattcatcttcagcaccagcttttgaaaatgtgaaacccaaacctgtgtctgcaaattctcccaagccagcttgtgaagatgtgaaggccaaaccagtatccgacaattcttctagacaagtttctgaggatgggcaacccaaaggggtctcttctaattctcctaaaccaggctctgaggatgcaaattacaagcgagtctcctgtaattcccccaaaccggttcttgaggatgtgaaaccaacttattgggctcaatcccatttggtcacaggatactgtacgtatcttcctttccagagatttgatatcacccagacaccgccagcatacataaacgtgttaccaggtttgccccagtacaccagcatatatacacccttggccagcctttctcctgaatatcagctaccaagatcagtaccagtggtgccgtcttttgtagccaatgacagagcagataaaaatgctgctgcctattttgagggtcatcatttgaatgctgagaatgttgctggtcaccagattgcctctgaaacacagatccttgagggctctttgggaatatctgtaaagtcacactgcagcacaggtgatgctcatacagtcctgagtgagtctaacagaaatgatgagcactgtggaaattctaacaacaaatgtgaagtaattccagaaagcaccagtgcagtaacaaacattccacacgtgcagatggttgccatacaggtatcttggaacataatacaccaagaagtcaatactgagccatataatccttttgaggaacgacaaggggaaatttcacggattgaaaaggagcaccaagtattacaagaccaacttcaagaagtgtatgaaaattatgagcagataaaacttaagggcttagaagagaccagggacctggaagagaagttgaaaaggcacttagaagaaaacaagatctcaaagacggaattagattggttccttcaagatttggaaagagaaattaaaaaatggcaacaggaaaaaaaagaaatccaagaaagactaaaatcactgaagaagaaaattaaaaaggtttcaaatgccagtgaaatgtatacccagaaaaatgatggaaaggaaaaggaacatgaattacatctggatcagtcccttgaaatcagcaacacacttacaaatgagaaaatgaaaatagaagagtatataaagaaagggaaagaggattatgaagagagtcatcagagagctgtggctgcagaggtatccgtacttgaaaactggaaggagagtgaagtgtataagctacagatcatggagtcacaagcagaagcctttctgaagaagctggggctgattagccgtgatcctgcagcatatcctgacatggagtctgatatacgttcatgggaattgtttctttctaatgttacaaaagaaattgagaaagcaaagtctcagtttgaagaacaaattaaggcaattaaaaatggttctcggctcagtgaactttctaaagtgcagatttctgagctttcatttcctgcctgtaacacggttcatcccgagttactccctgagtcttcaggcgacgatggccaagggcttgtgacttctgcaagcgacgtgactggaaaccacgcagcacttcacagggatcctagtgtgttctctgctggtgattccccaggggaggctccttctgcgctgttgccagggccaccccctggtcagcctgaagccactcagctgacagggccaaaacgggctggccaggcagctctgtcagaacgaagccctgtggctgatcggaagcagcctgttcctccaggacgtgctgcgcgttcaagccagtctccaaaaaagccgttcaatagtattattgagcacctgtcagtggtattcccatgttacaacagcactgagcttgctggttttattaaaaaagtgcgaagcaaaaacaagaactcactctcaggattgagtattgatgaaattgtccaaagagtgacagaacacattctagatgaacagaaaaagaaaaagccaaacccaggaaaggacaagaggacttatgagcccagctctgccacccccgtgaccaggtcctcccagggctcaccctcggtggttgttgcaccatcacccaaaaccaaggggcagaaagcagaagatgtccctgtgaggattgcactgggtgcaagttcctgtgaaatatgccacgaggtgttcaaatcaaaaaacgtgcgtgtgctcaaatgtgggcacaagtatcacaaagggtgctttaagcagtggcttaaagggcagagcgcttgcccggcctgccagggtcgtgatctcctgacagaagagtcaccttctggaagaggctggcccagtcagaatcaggagctgccttcctgctcttctaggtagtcacacttcactaaagtgtcatccaccagtgtgttgaatccgaagaatgacaattttctaccactggtgtaaaaaacaaacatttgaagacccttgtgcattgtgtgtcacaaagctaaatacatggaaatcgttaatatcgctgatattaagtaatttccccactctgagtgaatactttgatgattgccaacagtggctaataaaatgacggctaccacactcatgggtcactggggctgcgcagggctctttgaggtgggtggcttcttttggaaagtactatgaacgtctcgaagcagtattctagtgataagaattcttaacatagccaagcgccccacgtttgttccccacgtttgttccccttttctgtttgaaaaacctgttctggtagctccacaagagagatgatactgactttttaaattttttacaagagtctgtattcctgatatgcctatatttttcctcaaagattctgcattttaaggatgggcataagcaaactatattttaataatttatagttaatgttaaaatattggctgatttagaccaaaagattcaaatctcctctttgtgaaatcccatctgcatttgattttttattattttatgttcccccgttagattgttttaagtgtttgcttttcatcttttatagatgtaatctgattttcaaaaatcattaacactttttaattagtatcgactaagactttttccccctggaatcgaggctgtgtgtccgtcatcccagcccccggttggagcctgctctttgaactccgctgccttccttagcagcttctgtcctcttctgtgagtcagtcagcgagtgcttgggatccgcatccagccgtgctgagcacacaacaggctgtgtgtggaaatggccaccaccattctccttccccaccccaccacaaaaagagaagctgtgtctttagacaaccctgaggtatctgtgttacaatcgttctgtgtttgatatttgtgtaaagtatgcatgcagtcttgtactgtgacctaagaacaaaactgtaactgcattagaaaccatgaaaaaattagatattgttttgtgacttttagacagtggtaaatatagaaccatgaattctggtcacattccatttctctccaacatgaaggatcaaaaaatgtttttcaatgtgttctttgttccactggaaacttagagtcatgagtttatgagctgatttggtcaccttcctctgcctttgttcactgtgagttctgatgtcttagtgacttagttcttagaagctcacgccttagtttgaaacagattctccacggtggtccccaaaacactgtctgcatatccataagaattgagcgctatgggtgttaacgtgcatgaggatcagtttgcagcagcaagtacaaaaggagaagaggaacatccgttgaatgagtgtgttttgtacataacttcagatacttgtgaacatgccttatatttgtccaacaactgtcagaataaagaacattctaaaatgagaaaaaaaaaaaaaaaa

SEQ ID NO: 2279 - DNA, 2539 bp, Homo sapiens
ggaagttcgccgacgacgcgcccgccctgggccaccggcgccggcccaagttcgccgggggggcccggaggaagcttgggggacgcgacgggggaacgcggaaaccccggggatctgcaggcgcgcccgggccgtgtgccttctctccgcgtgtccaaaccgtgtccccagccgcgcgccatgcgctctgggggcgtgcgcagcttcgcgctggagctggcgcggggcccgggcggcgcctaccgcggcggggagcggctgtgcggccgggtgctgctggaggcggcggcgccgctgcgggtgcgagcgctcgaggtgaaggcgcgcggcggggcggccacccactggttggagggtcgcagcgtgggcgtcaacgccgtatccagcgactacgcggccgcggagacctacctgcggcgtcggcagctgctgctccgagataccggggagaccacgacgctgcctcctgggcgccatgagttcctgttcagcttccagctgcccccgaccctggtgacatccttcgagggcaaacacggtagtgtccgctactgtatcaaggccaccctgcaccggccctgggtcccagcacgccgggcaaggaaggtgttcactgtcatcgagcctgtggacatcaacacgccagccctgctggcacctcaagcgggggctcgggaaaaggttgcccgatcctggtactgtaaccgtggcctagtctccctttcggccaagatcgaccgcaagggctacaccccaggagaggtcatccctgtctttgccgagatcgacaacggctccacacgtcctgtgctgcctcgggcagccgtggtgcagacacagacgttcatggcccgaggcgcccgaaagcagaaacgggcagtggtggccagcctcgcgggcgagccggtgggccccgggcagcgggcgctgtggcagggccgggcactgcggatccccccagtgggtccttccatcctgcactgccgcgttctacacgtggactacgcactcaaggtctgtgtggatatcccaggaacgtccaagctgctgctggagctgccactggtgatcggcaccattcccttgcacccttttggcagccgttcctccagcgtgggcagccacgccagcttcctgctggactggaggctgggggccttgccggagcggcctgaggctcctcctgagtactcggaggtggtagccgacactgaggaggcagccttggggcagagccccttcccgcttccgcaggaccccgacatgagccttgaaggcccgttcttcgcctacatccaagagttccgctaccgcccgccacccctgtactctgaggaggatccaaacccactcttgggggacatgaggccgcgctgcatgacttgctgaacggcacagggacccctcgaggaacaaggttgcacaccagctttcagccaccatgactgtggggagtggctggaccaagggctgacctccccgactgcatcaaagttggggaaccaagtctcagagtgaggcgggggcctttcggatatcacatgggacagaggaagagcccggctggaatctgacttacctggaccgctgtccttgtgaggcattgaatgcccagtgcagtatccgagagactgtttaataacctgtcttcccagccaattggtggtgctggaatcccctaggagccttcagtctgggagaaacagagccagacatagacagttccagcatcacagaaccagaagaagagacctgcaactgtgagagtccagacaggaagcagagaaggcgtccttgcggaaagggcattttagctgaggctttggagtacgaataggagctcagcaggcagacgaatgaggaataaaggtcagagaaggtcagagctgagtgacgtttggaatccaccccgtttattgtagaactgggggttcagagggcaggtgcctcagagttgaggccacacagtgaggtctggtgggtgaaaggacccaggaacgaggcgttcaggaaagcaggttgtcagagctatgtggagtctgtgggtggcaggggcagccgctccagcctttgaagactttgaaagccagagattcctggcgcaggcttggacttcctgggagctcctccaagtacccaggggcatcagagctgcctgggtgttacatggcccagggaacccaggttcagggtaggacaggcaagaccagatacccaatgtgcaaagtgaaaacactgggctccctgttaaacgatgaagaattcaagacagtgacagcattacgtcacccctggggacagaggtcagcctaaggtgacacacggggactactgtgcttccggaggctccctgtgtcctggaggagaaaagcattagagggggcagctggacaagctcccaactgcagagtcccagccctggctggggcagggccccggcctgggactcagcatttctgatatgccttaagaattcattctgttttgtacaattattttttaaaagtaaacgtgtggagaaagaaaaaaaaaaaaaaaa

SEQ ID NO: 2280 - DNA, 2446 bp, Homo sapiens
gcagcctcggcgcgtgtggccgcggatccccagctccaagggcctcaccttcctgccgccacctcctaggacagcggcgtgaggcccaaacctctaggtagggcccagttggatcctgatttttcattgagccaggcagtctcagcccgagttgaaaggcctccttagccttggaactaacgtctcttcaccctgacttctgggcaaggggagatcccaggaaaaggtttacctgcaggttttcctaggccaaagccccagcaaggaccccctctccaacctttgttatagggctacatggggcctgggctcagcatcctcatttggggtaaactgaggcccgggacaagcccggcagagcctaaggctgctcggggagtggggccaatcagagatgattggagctgccagaaactctaatcagatgacctccaattcatccttaaaagttgaatggtggggaggggctggagtctcttcctccctcctcccaagttggggctcctggatgtgttgactccaggctgtgcctggttgtggagggtctggggcagggtgtgaggggtgctgtggaactggagcaggagacagggctgggtgttcctggtgcagcccttctgggcatgggagagaagccccaaggccctgggttgctccccaagagcagctctgaggcctcctgctcagccctggcctgtgtggggagcgagtgtgccccccacccagcccctgccaccgccgttacttattctcactgatgtggggttatcatataattggcaccatgctgtctgtaggacattatgacgtgcttgggttctggtttgagttggcagcccgttgggtctctctgcctggtggagccttggggtggcaggtacgtcccttcccccgcccaggtgcttcatcctcatggccaggcctggtggcttggcacgtctctgctgccccaagcccagcttccttccgctgggcgttcccgccccactggctctgccggacttggctactgggctctcccctccctcatgcctctgcccagagatgtcccaaaggccctcagggccaagccgggccagggatgtggctgccacagctgagaccaagggctctggctggcccgtccccaccaggtggccctgccctccccaagttgggggttgtggcacttggggtcaggcctagccacgtaaggacacaggtaacaccctgaggatctggcattggcagcttcaggcctaactttcctggtcagggccccttaaggtggcccgggcacattggtttcatttcgatgagactttgtcagaggcctggtctggtcctggccctaccgccccagctgtccttcagcacagctcggggtggggactccaggatgctgggtctgccccttgggaggggcactctggaaggtcagggtgatccacaactgtgagctgaggttggatgcagctgggagcttgggacagagagagcccagggctcccctgctgtgggcacctgcccagcggggacatgagatgacagagacgtccccggcgggggtactcaggtgctacgaacatggcagctcttgtttccggctgagccatggccagagcagggctcagtctgcccctgaacttgctgaatggaccgacgagctgagcctgaaagcccagaagagcctcggtccagaagacggagactcggcccggtgtccagcgcagcccagggcttcctggggggcagcaggagtgcctgggggtcaccgccttcaggacaatggcctcagtggctctttctttctgccctgaactggcacctgcacctcctctgcttcctagagggtgacctgggccgagccgcccagtccttcttcccctgaggccagaggggacgccccgcagccacatcacacaggatcctcagcagccatagtctcgcttcagggtgtccagtgtttcgaggaggagaggggacaggggccaggtccactcccttggccctcctcttggaccccaaggccaggccggatccttttatcccgtggggagcccctgcctcggccatcgggatgaggtccctcaagtccctgcacaagcaggtcagagacccacccacatgccgttcctgggctacgccacgcgccatcccccggggctgtggacgcacccagcccccgacagacaggcgccctgagagctccgaaggcgcgatccccatccccaccagtggagaagccagaaccgcgattgttgcatctgggaaaacccagctggagccgaacggcccgtgcccccactgtaattgtgctgaaaatgtttctcaaatgacccaaattggctcttattttttctaatggccctttcaaagtattcatgaaattgatgctgtgtcataaaacaaaaataaaagatttcacagcaaaaaaaaaaaaaaaaaaaaaaaaaaaaaaaaaaaa

SEQ ID NO: 2281 - DNA, 6789 bp, Homo sapiens
ctcgcgccaggcgagtctccgcgtctccctcgcgaactcggtgaaaggaattggcgccgttcgacaccaggcggatccgctctgcagcacgaacccatctccagccgcagccgcagccgccgcccgggccgaggagcagccgcagcagccgccaccagtggccgagtgagcggagccgagtttgaggcagcgcctagcggtgaatcggggccctcaccatgagttcctcgcctgttaatgtaaaaaagctgaaggtgtcggagctgaaagaggagctcaagaagcgacgcctttctgacaagggtctcaaggccgagctcatggagcgactccaggctgcgctggacgacgaggaggccgggggccgccccgccatggagcccgggaacggcagcctagacctgggcggggattccgctgggcgctcgggagcaggcctcgagcaggaggccgcggccggcggcgatgaagaggaggaggaagaggaagaggaggaggaaggaatctccgctctggacggcgaccagatggagctaggagaggagaacggggccgcgggggcggccgactcgggcccgatggaggaggaggaggccgcctcggaagacgagaacggcgacgatcagggtttccaggaaggggaagatgagctcggggacgaagaggaaggcgcgggcgacgagaacgggcacggggagcagcagcctcaaccgccggcgacgcagcagcaacagccccaacagcagcgcggggccgccaaggaggccgcggggaagagcagcggccccacctcgctgttcgcggtgacggtggcgccgcccggggcgaggcagggccagcagcaggcgggaggggacggcaaaacagaacagaaaggcggagataaaaagaggggtgttaaaagaccacgagaagatcatggccgtggatattttgagtacattgaagagaacaagtatagcagagccaaatctcctcagccacctgttgaagaagaagatgaacacttcgatgacacagtggtttgtcttgatacttataattgtgatctacattttaaaatatcaagagatcgtctcagtgcttcttcccttacaatggagagttttgcttttctttgggctggaggaagagcatcctatggtgtgtcaaaaggcaaagtgtgttttgagatgaaggttacagagaagatcccagtaaggcatttatatacaaaagatattgacatacatgaagttcgtattggctggtcactaactacaagtggaatgttacttggtgaagaagaattttcttatgggtattctctaaaaggaataaaaacatgcaactgtgagactgaagattatggagaaaagtttgatgaaaatgatgtgattacatgttttgctaactttgaaagtgatgaagtagaactctcgtatgctaagaatggacaagatcttggcgttgccttcaaaatcagtaaggaagttcttgctggacggccactgttcccgcatgttctctgccacaactgtgcagttgaatttaattttggtcagaaggaaaagccatattttccaatacctgaagagtatactttcatccagaacgtccccttagaggatcgagttagaggaccaaaggggcctgaagagaagaaagattgtgaagttgtgatgatgattggcttgccaggagctggaaaaactacctgggttactaaacatgcagcagaaaatccagggaaatataacattcttggcacaaatactattatggataagatgatggtggcaggttttaagaagcaaatggcagatactggaaaactgaacacactgttgcagagagccccccagtgtcttgggaaatttattgagattgctgcccgaaagaagcgaaattttattctggatcagacaaatgtgtctgctgctgcccagaggagaaaaatgtgcctgtttgcaggcttccagcgaaaagctgttgtagtttgcccaaaagatgaagactataagcaaagaacacagaagaaagcagaagtagaggggaaagacctaccagaacatgcggtcctcaaaatgaaaggaaactttaccctcccagaggtagctgagtgctttgatgaaataacctatgttgaacttcagaaggaagaagcccaaaaactcttggagcaatataaggaagaaagcaaaaaggctcttccaccagaaaagaaacagaacactggctcaaagaaaagcaataaaaataagagtggcaagaaccagtttaacagaggtggtggccatagaggacgtggaggattcaatatgcgtggtggaaatttcagaggaggagcccctgggaatcgtggcggatataataggaggggcaacatgccacagagaggtggtggcggtggaggaagtggtggaatcggctatccataccctcgtgcccctgtttttcctggccgtggtagttactcaaacagagggaactacaacagaggtggaatgcccaacagagggaactacaaccagaacttcagaggacgaggaaacaatcgtggctacaaaaatcaatctcagggctacaaccagtggcagcagggtcaattctggggtcagaagccatggagtcagcattatcaccaaggatattattgaatacccaaataaaacgaactgatacatatttctccaaaaccttcacaagaagtcgactgttttctttagtaggctaactttttaaacattccacaagaggaagtgcctgcgggttccttttttagaagctttgtgggttgattttttttcttttcttttttgtacatttttaattgcagtttaaaagtgaatcgtaagagaacctcagcattgtgcacgataagagaatgtgtcagtatttcagggttctacattttatctgtaaaatgtgacttttttttttttttatcacaacagaagtaaaatgttgctttgtacctggtgtcttttattaagaatttactccccccatttctcacagagaataacagtcgggagtcattgtcacaatataatagaaatgttagcaaccagattcatgtaaggactaagtggtcctcatgaattgcattaagactctgtactgctcatattacactccatcctctctgtagtttgctgggtagtggagggggtaagctaaatcatagtttctgacaataactgggaaggttttttcttaaaataacaatggaattggtataattgggattgaaaactaaaacttggaactaagatagagaagatggagtgtatgtagaagggctgttaaaaatgtaaaacttggttgcattatttgtggaggctcaaacttgtgaaggttaataccataatttttccatttgttctgcattttgattctgaaaagaaagctggctttgcccatttcttattaaaaaaacttgttgtaaatccagttgtctaatgggatctatatgaagttagccatgtctgtatgcccttctcccacaaaatactgtataactagtgtgcttgtagtagttaactccaccatctttgtaagctaatgaaattgtgagtcacccatttatatcttaatttttaatcatgtcagttcttgaatgggtatctccttagcctgctgatttctttttctttctaaagaaagtgggtggagaaattaatttagacgtttgtttgcaataaaaagaattcattttactcttgttttgggattctcgccatcaaggttcaaaatccctttatataactcccaagaggagaaatttattaagtgtgtgctttctggacagcttattctttactctgcatagaacatttaggttttaaaaacttaaatgtatactgacaattgatacataattatgaagtaaagttgaattcttcccttcccctcccccccagacaacttttaacatatttaatgaggggaaaaggtactggctgggagaagttaacactgagtttatcatctttacagaatgctaatgctgtcctcaactgattattttatatacatatatatgatacatgaaactctgggatcagatgcttttagaagccatcatgcaagccagtcattgatgtcactgctacacaacactgctaacttgactgtagctatgtaataacattagatcccctaattgtaattatattgggtttgcacagaacactttaatcttcccctcaccaatgtgaagtgaggaatcaggagtcaaactgtagaactaaaatttgacttcagtctagcgtttccttggtgtttttaggttgctttggtaagtttaggtttgctatatttctgattgcttagaattttgttttagccctttaaaatcagatcataaatatgaattcatacttctaaggaattttcttgctataagctggagtttaggtgatgtataggttcagttgagacatttttggaacaggcaaatccttagttaacataagatatttaacagttgaagatagtgtcatggatttttatcttttttagcaagtaatgctaagaaccactggcctgagctactactcttcagtatacattattaggattgcatagacttactagaggaacagtttcaggttttgatgctaatcagtgttgtgtcctaaagttgtcctttgtgcctttaaaaagttttggatatatcttctagtttaaaattgcttattaaggaattcattttataattgcagtgggaaagtaatggtcaagtaacactaggtagactatcatgcctgtttagcccagagaatttggggggagagagaatagataaaaatggcacccagaaaaatgttaaaatctttagtcaagactagaattaatacaattgtctacacttgtatggcagaaataaccttataaagtgtttaaggaattcagagaagggaatgtaccaaataagcaacagggagaaaattaggtaagaagtaagatacgaacgagaaacctgatttattgctcatccttcccttgcctccctaatggcaagcaaaactctgaacatctgaaaaggatgtagttctggacaaatcctgactacccagaggaaactcactgtgagattgctgttgatttgaagggtgctttcactaaggttatattttaaagtagaataacacatgctgagtgtaaactggctttggattggtcagctgcagtagtacaaaaacagcatagaatttgagaaaactaaaactgctatgagatagctatgagaaaactaaaactgctatgagatagaaatgatgtaaaattatgtggaaagttttccctcatatactcacatacagcctttgaagggctctggctctgaccggttgatggccttgagcgagatgaaatcatgaaattgagtcaaatcaatttgacattgaaatgacaagaggaaactcttaaatacataaaaacaagctctcatttgcctaggatagatactgtcttaaaaataaagactgaacctagatgttctgagcactagcaacaaggtattttaacaagtttaaaggaattctctgaaaaagttataaaattattctaggaaacataaccataatagtgttttaagggactttcacctggggattttatattcatgaacagagtgtattctgtatttaaaatgtctcatttgtgggaattggatgacatgttttttgataaatttattcacaatataaattgactttttattctaggaccatgtgaataatgggttccattgcacaaatacaaatattttaatagcttcttaggcagtggtgtagacatcttggatataaataattgtagatcttgtatatttgatttttaaaaaactagaataaacagagaggcataaacatatcttagagtccaagtggtagtgtttagcattggatataataaatggatgttttacaaagtgtttccataattctcttcctatacataaatgtcttgttttcaaaagtggatggaacttggctgggtgtggtggctcacgcctgtaatcctagcactttgggaggccaaggcgggaggatcacttgagctcaggagtttgagaccatcctgggcaacatagtgagacctggtctcttgaaaaaaaaaaagtggatggaacttgtagcagagaattttatctacttctcaacctgcttcagaatacccatttgagatgttcccctggaaagatgaacacaatactgcatctgaagccatttcttcccacctaacattcttaaaatgattagagtctaaactttgtcattcattcctaattctggagctctgaggttgaggtgttcagagtttggtgaataattgggtttaagttttaacattttagtaataataaaagcaaacacatacatgttaaggcctgacaataggttgcaatacccatgcattgggactcatacccagcataaatggtgagggactgaacattagtgctttgagcaagaattggttaactacctgagatctctaaaacagtaatttgaattactaatacataaaccacaagtctcttcgaattgttaattgcctaaatttaccctaaaacttagttaacgctgcagtgcctttattaaagcttttttttgggggggggtgtgggcacagctactccataactttaaattttaaagcatgaaggtgatctagctagtgttagtgcttgagttggtagttacataggctgctcttgaatcgtcctgttttctttgcctagtattagcaccacaggtacatatttgtaaaataagcattaaaagtactttgtccagc

SEQ ID NO: 2282 - DNA, 6691 bp, Homo sapiens
ggccaagggcggggcccgcgagggaggccgggcggcccggcaagcggcgctgcggggtaggctgctttcctgaggccggactcaacgggtctcggctgagccaccgggtgagctcaccgcccagcccaaaccaggagattgcgagggagcgatgcggtgcagcgcgatttgcttgtaaatgcatcacgaagaggcagcccagaatgaagaaagcaagcaggagtgttggctcagtgcctaaagtgtctgcaataagtaaaacgcaaacagcagaaaaaattaaacctgaaaacagctcttcagcatctacgggaggcaaacttgtaaaacctggaacagcagcatcattgtcaaagaccaagagcagtgatgaccttttagctggaatggccggaggggtaacggtgactaatggtgttaaaggaaagaaaagcacctgcccatctgcagcaccttcagcatctgcccctgccatgaccaccgtggagaacaaatccaagattagcacaggcacagcttcttcaaccaagcggagcacttctacaggtaataaagaatccagttctactagagaaagattacgtgaacgtacccgattaaaccagagcaaaaaactaccttctgcaggtcagggagctaatgacatggcattggccaaacgttcccgcagtcgaactgctacagaatgtgacgttcgtatgagcaagtctaagtcagacaatcagatcagtgacagagctgctttggaggccaaagtgaaggatcttctcacgctggcaaaaaccaaagacgtagaaattttacatttgagaaatgaactgcgagacatgcgtgcccagctgggcattaatgaggatcattctgagggtgatgaaaaatctgagaaggaaactattatggctcaccagccgactgatgtggagtccactttattgcagttgcaggaacagaatactgccatccgtgaagaactcaaccagctgaaaaatgaaaacagaatgttaaaggacaggttgaatgcattgggcttttccctagagcagaggttagacaattctgaaaaactgtttggctatcagtccctgagcccagaaatcacccctgataaccagagcgatggaggaggaactctgacttcttcagtggaaggctctgcccctggctcagtggaggatctcttgagtcaggatgaaaatacactaatggaccatcagcacagtaactccatggacaatttagacagtgagtgcagtgaggtctaccagcccctcacatcgagcgatgatgcgctggatgcaccatcctcctcagagtcggaaggcatccccagcatagagcgctcccggaaggggagcagcgggaatgccagtgaagtgtccgtggcttgcctgactgaacggatacaccagatggaagagaaccaacacagtacaagtgaggaactccaggcaaccctgcaagagctagctgatttacagcagattacccaggaactgaatagtgaaaacgaaaggcttggagaagagaaggttattctgatggagtctttatgtcagcagagcgataagttggaacactttagtcgacagattgaatacttccgctctcttctagatgagcatcacatttcttatgtcatagatgaagatgtaaaaagtgggcgctatatggaattagagcaacgttacatggacctcgctgagaatgcccgttttgaacgggagcagcttcttggtgtccagcagcatttaagcaatactttgaaaatggcagaacaagacaataaggaagctcaagaaatgataggggcactcaaagaacgcagtcaccatatggagcgaattattgagtctgagcagaaaggaaaagcagccttggcagccacgttagaggaatacaaagccacagtggccagtgaccagatagagatgaatcgcctgaaggctcagctggagaatgaaaagcagaaagtggcagagctgtattctatccataactctggagacaaatctgatattcaggacctcctggagagtgtcaggctggacaaagaaaaagcagagactttggctagtagcttgcaggaagatctggctcatacccgaaatgatgccaatcgattacaggatgccattgctaaggtagaggatgaataccgagccttccaagaagaagctaagaaacaaattgaagatttgaatatgacgttagaaaaattaagatcagacctggatgaaaaagaaacagaaaggagtgacatgaaagaaaccatctttgaacttgaagatgaagtagaacaacatcgtgctgtgaaacttcatgacaacctcattatttctgatctagagaatacagttaaaaaactccaggaccaaaagcacgacatggaaagagaaataaagacactccacagaagacttcgggaagaatctgcggaatggcggcagtttcaggctgatctccagactgcagtagtcattgcaaatgacattaaatctgaagcccaagaggagattggtgatctaaagcgccggttacatgaggctcaagaaaaaaatgagaaactcacaaaagaattggaggaaataaagtcacgcaagcaagaggaggagcgaggccgggtatacaattacatgaatgccgttgagagagatttggcagccttaaggcagggaatgggactgagtagaaggtcctcgacttcctcagagccaactcctacagtaaaaaccctcatcaagtcctttgacagtgcatctcaagtaccaaaccctgctgcagctgcaattcctcgaacgcccctgagcccaagtcctatgaaaacccctcctgcagcagctgtgtcccctatgcagagacattccataagtggaccaatctcaacatccaaacccctgacagccctgtcagataagagaccaaactatggggaaatccctgttcaagagcatctgttaagaacatcttcagccagccggcctgcttccctgccaagagtgcctgcgatggaaagtgccaagaccctctcagtgtctcgacgaagtagtgaagaagtgaaacgggacatttctgcacaggagggagcgtcgccagcctctctgatggctatgggaaccacgtctccacagctttccctgtcctcttctccaacggcatctgtgactcccaccacccgaagccgaataagagaagaaaggaaagaccctctctcagcattggccagagaatatggaggatcaaagaggaacgccttgctgaagtggtgtcagaagaaaacagaaggctatcagaatattgacattacaaacttcagcagcagctggaatgatgggctggccttctgtgccctcctgcatacatatctccctgcccacattccatatcaagaactgaacagccaggataagagaaggaacttcatgctggctttccaggcagctgaaagtgtcggcatcaaatccacactggacattaatgaaatggtacggactgaacgacccgactggcagaacgtgatgctgtatgtgacggcgatctacaagtactttgagacctgagcatgccgggaggagccgccccaatagcgggggtacccctccacagcgaccgagcgacaccgacgccattagctacgcacccctgtaaagcttccagcaactctgggctgccccacagcgtgtgagcctccagctcggggcttccgtattggaagaactcagccgtgtggcccacagctcccaccagggcccctcccacatgacccgtccattcaggtcatgtgggctcagcacacatcctgcaggccggtggctgctggagttttccttctgaagagaatattgaactacactagtgctccagggcaccaaacaaaaagggctcatgcacagctgaatttgggaaaagggattcagttctgtgggaaactcactagggttgatgaaggctcggccgcggcacttcctgactattggctggggtgggttccggtgctggtgagaacccagaaggagagtcagcgcctggcagttcccagcgccctgggcccttcaccgtcctagtttggaggagcatgttcaccacagacgtgggtcagctgccccacacctgacggggctgtcccggccgacacaatccaggcgtgttcagcctgagctaggagagtatctagagggcgtggtgcgggcacgccagggctggggtgctgctgctgcactcacgcggctgggctttctggcgggaagcagttacgggggccccttgcctggactcagcgacctgtcttccagcctggaaggggtttggagtcccagctctggctttagatttcttcatcataaggagtttttctagttaacatttttgttttgttacgagcaatgctggaaaaggtcgctcctgttctgttagtaccaaagttacattgtttcaataagcatagaaatctaaacaacatctgtacattagcatggtgagagcaaggaataaagcaggaaataggagaaaagtaaacaactttagggagcccaggcagtgtcatttaaactcactgagtcactaagacataattctcctaggccagagttaaagaaagtgccttaactcttcttgtgagggcagccactgccctccgtggccaaggcaggacctccaagactcagtggttgagttgtctcctaccaccatgcccgccctccccaggtactgggtccatgccccctgtgcccaccctccccaggtgctgggtccatgctgtttgaaccaaagccttatttaaaggtggtcactggagatgctctcaggccagaactcaacagctatttttgggaatagggatctcccgtgtgcctaacgcagtagctattggtttgaacaatgtccagacaagacctgtacctttgagaatataactgtgtttggcacctgcatagcaccatgaggaagaccagccaccagtggaagcggggtcactgccccacagactggatgcaatgaggggctcacaggaggcccagccagcccgattgtgggctgaggggtctgcattcaagcacgatgttctagaataggagtttaacgtgtctacgtaacctagaatgtggttattaggaaaggggctgtgcatgtgggtgcagctggcggcacacctggtcaccagatggccagaagctgcccatcagccctgcccagatgtcagcctgggagctcaggctgctgccgctggctggatgccctttggtgaaatgcctgttttcagctaagaaaggagaggccaggcaagcaaagtcatgccacaaagcatatcagagacccccgcagactcctggccccgtcccgccccctgtctgagttgtgtttttgttgctgttcctctgttgatggccagctctgctgttggcatgagccactgatgttcatgtgagaattactgtttttaagtgtctctccacttaggtgtcctcagttcccacttttgctctcatttgccttcacagaggccactccacctgtccggatccagctgtctggtcatggtttggtttatttattttgtccttcaggggctgttttgccctaagaatgagggggcttcccctggtctgcagttcccaactttatcccttgctggccatgcgagcccagccctggtgcctcatgggatgggggggtaggggtccccaggatcttctggaggaaggtggccatggatggatgggctgtatctgtgttttccctctgggagtctcatgggtccagcatcaggcctgaggtcagcaacagggaaagagggtgggcacggggagggcttggccccgcctatctagaggcttgcctcgggcccctccttggggaaggtttgcgtgcagagctgcaagggagagggttccagaagcattgccttttgcctcgtctaataggatccttaggacactgtgggctttaggaatgactatagatgctcacacgtgtttaaagtgacatttggagatgctctcagtcctgtggcatctggcacgaagtctccaagaagccactttgcctcttctcccttcaagcacaagctttactgcaaaagggccagtcgcgtttctatttctctcgatcccaggcttctgcggaccgacgatacgtttaaatgttgttctagtaaatattcttgaatgtattaaaatggctgaaacaacaagcttgggcttttctagcttgccctccactccctgccgtccctctgacgtcgcataaaccagaacccagctccctcctgggactggctgtggagagaagggcacctctgagccagcctgtggccctaccccaaggcgcacttcctcatgtgggcagatcctgaccaggagtccagggtggcctcccctgggccacagcacatcaccgtgtggcctggggctgtgggacagtgagccctgtaaccactagggttctgtgacagatgccaagaccccagagaccgtggcagagctacccccaggagagcggaagcccctacacagcccagacacatgccttccctgggggctggggagtgtgtctcgaggggttttgtttgttttgaggcatgtatcatcttggaaataattgtcaggatgtataaaatagagaaaaagaaaaaaggtatcctacccagaggcaaccagataaacttttttgcctgtgcaaaaaaaaaaaaaaaaaa

SEQ ID NO: 2283 - DNA, 3058 bp, Homo sapiens
aaaaatgcataaagagccaagtgcttatattctggccaagttatgaggctctgagaacaagagcttgaggggaagactgttaaccccatccacgccaccagaattagctctttcccttttggtttgcaagcactgcctgtaaagccctcgcatgagaggccagcctgctagggaaatccaggaatctgcaacaaaaacgatgacagtctgaaatactctctggtgccaacctccaaattctcgtctgtcacttcagacccccactagttgacagagcagcagaatttcaactccagtagacttgaatatgcctctgggcaaagaagcagagctaacgaggaaagggatttaaagagtttttcttgggtgtttgtcaaacttttattccctgtctgtgtgcagaggggattcaacttcaatttttctgcagtggctctgggtccagccccttacttaaaggccataagatgttttattgaaagaaactttcaatatcaagtaatccaaccaaccttctaagataagccttttccttcaacacaaagaagtgcattttgccaaatctggaaagcatgaagactgggctttttttcctatgtctcttgggaactgcagctgcaatcccgacaaatgcaagattattatctgatcattccaaaccaactgctgaaacggtagcacctgacaacactgcaatccccagtttaagggctgaagctgaagaaaatgaaaaagaaacagcagtatccacagaagacgattcccaccataaggctgaaaaatcatcagtactaaagtcaaaagaggaaagccatgaacagtcagcagaacagggcaagagttctagccaagagctgggattgaaggatcaagaggacagtgatggtcacttaagtgtgaatttggagtatgcaccaactgaaggtacattggacataaaagaagatatgagtgagcctcaggagaaaaaactctcagagaacactgattttttggctcctggtgttagttccttcacagattctaaccaacaagaaagtatcacaaagagagaggaaaaccaagaacaacctagaaattattcacatcatcagttgaacaggagcagtaaacatagccaaggcctaagggatcaaggaaaccaagagcaggatccaaatatttccaatggagaagaggaagaagaaaaagagccaggtgaagttggtacccacaatgataaccaagaaagaaagacagaattgcccagggagcatgctaacagcaagcaggaggaagacaatacccaatctgatgatattttggaagagtctgatcaaccaactcaagtaagcaagatgcaggaggatgaatttgatcagggtaaccaagaacaagaagataactccaatgcagaaatggaagaggaaaatgcatcgaacgtcaataagcacattcaagaaactgaatggcagagtcaagagggtaaaactggcctagaagctatcagcaaccacaaagagacagaagaaaagactgtttctgaggctctgctcatggaacctactgatgatggtaataccacgcccagaaatcatggagttgatgatgatggcgatgatgatggcgatgatggcggcactgatggccccaggcacagtgcaagtgatgactacttcatcccaagccaggcctttctggaggccgagagagctcaatccattgcctatcacctcaaaattgaggagcaaagagaaaaagtacatgaaaatgaaaatataggtaccactgagcctggagagcaccaagaggccaagaaagcagagaactcatcaaatgaggaggaaacgtcaagtgaaggcaacatgagggtgcatgctgtggattcttgcatgagcttccagtgtaaaagaggccacatctgtaaggcagaccaacagggaaaacctcactgtgtctgccaggatccagtgacttgtcctccaacaaaaccccttgatcaagtttgtggcactgacaatcagacctatgctagttcctgtcatctattcgctactaaatgcagactggaggggaccaaaaaggggcatcaactccagctggattattttggagcctgcaaatctattcctacttgtacggactttgaagtgattcagtttcctctacggatgagagactggctcaagaatatcctcatgcagctttatgaagccaactctgaacacgctggttatctaaatgagaagcagagaaataaagtcaagaaaatttacctggatgaaaagaggcttttggctggggaccatcccattgatcttctcttaagggactttaagaaaaactaccacatgtatgtgtatcctgtgcactggcagtttagtgaacttgaccaacaccctatggatagagtcttgacacattctgaacttgctcctctgcgagcatctctggtgcccatggaacactgcataacccgtttctttgaggagtgtgaccccaacaaggataagcacatcaccctgaaggagtggggccactgctttggaattaaagaagaggacatagatgaaaatctcttgttttgaacgaagattttaaagaactcaactttccagcatcctcctctgttctaaccacttcagaaatatatgcagctgtgatacttgtagatttatatttagcaaaatgttagcatgtatgacaagacaatgagagtaattgcttgacaacaacctatgcaccaggtatttaacattaactttggaaacaaaaatgtacaattaagtaaagtcaacatatgcaaaatactgtacattgtgaacagaagtttaattcatagtaatttcactctctgcattgacttatgagataattaatgattaaactattaatgataaaaataatgcatttgtattgttcataatatcatgtgcacttcaagaaaatggaatgctactcttttgtggtttacgtgtattattttcaatatcttaataccctaataaagagtccataaaaatccaaaaaaaaaaaaaaaaaaaaaaaaaaaaaaaaaaaaaaaaaaaaaaaaaaaaaa

SEQ ID NO: 2284 - DNA, 3224 bp, Homo sapiens; identical to SEQ ID NO: 2255

SEQ ID NO: 2285 - DNA, 1160 bp, Homo sapiens
cgcgactacgctcataaaaggaaaaaaaagcgtgtgcggttctcgacgtgccgccaatcttcgaacgcaggtctgtgatcatccgcagactccgaaaaagggttcgaggaacgcgcctgctcccctcgtcgcagtttccagcccgacgagcttgttttgtcccggactcggtgcccctgtagacaatggccctcgtgtctgccgattcccgcattgcagaacttctcacagagctccatcagctgatcaaacaaacccaggaagagcgttcgcggagcgaacacaacttagtgaacatccagaagacccatgagcggatgcagacagagaacaagatttctccctattaccggacaaagctgcgtggcctctacacaaccgccaaggccgatgcagaggctgagtgcaacatccttcggaaagctctggacaagatcgcggaaatcaagtctctgttggaagagaggcggattgcggccaagattgccggtctctacaatgactcggagccaccccggaagaccatgcgcagaggggtgctgatgaccctgctgcagcagtcggccatgaccctgcccctgtggatcgggaagcctggtgacaagcccccacccctctgtggggccatccctgcctcaggagactacgtggccagacctggagacaaggtggctgcccgggtgaaggccgtggatggggacgagcagtggatcctggccgaggtggtcagttacagccatgccaccaacaagtatgaggtagatgacatcgatgaagaaggcaaagagagacacaccctgagccggcgccgtgtcatcccgctgccccagtggaaggccaacccggagacggaccctgaggccttgttccagaaggagcagctcgtgctggccctgtatccccagactacctgcttctaccgcgccctgatccatgcgcccccacagcggccccaggatgactactcggtcctgtttgaagacacctcctatgcagatggctattcccctcccctcaatgtggctcagagatacgtggtggcttgtaaggaacccaagaaaaagtgatgccgcctggcagactcgccatcccccaacgacacagggcaggacagcagaggacgtgctgggattaaacacattccccctctaaaaaaaaaa

SEQ ID NO: 2286 - DNA, 4313 bp, Homo sapiens
ctacgctcttccagctgtcggacctgggaaattctcctgtgctaaatcccgtggcgctcgcgggtgtcgccgcggtgcatcctgggagttgtagttttttctactcagagggagaatagctccagacgggagcaggacgctgagagaactacatgcaggaggcggggtccagggcgagggatctacgcagcttgcggtggcgaaggcggctttagtggcagcatgaagcgcaccccgactgccgaggaacgagagcgcgaagctaagaaactgaggcttcttgaagagcttgaagacacttggctcccttatctgacccccaaagatgatgaattctatcagcagtggcagctgaaatatcctaaactaattctccgagaagccagcagtgtatctgaggagctccataaagaggttcaagaagcctttctcacactgcacaagcatggctgcttatttcgggacctggttaggatccaaggcaaagatctgctcactccggtatctcgcatcctcattggtaatccaggctgcacctacaagtacctgaacaccaggctctttacggtcccctggccagtgaaagggtctaatataaaacacaccgaggctgaaatagccgctgcttgtgagaccttcctcaagctcaatgactacctgcagatagaaaccatccaggctttggaagaacttgctgccaaagagaaggctaatgaggatgctgtgccattgtgtatgtctgcagatttccccagggttgggatgggttcatcctacaacggacaagatgaagtggacattaagagcagagcagcatacaacgtaactttgctgaatttcatggatcctcagaaaatgccatacctgaaagaggaaccttattttggcatggggaaaatggcagtgagctggcatcatgatgaaaatctggtggacaggtcagcggtggcagtgtacagttatagctgtgaaggccctgaagaggaaagtgaggatgactctcatctcgaaggcagggatcctgatatttggcatgttggttttaagatctcatgggacatagagacacctggtttggcgataccccttcaccaaggagactgctatttcatgcttgatgatctcaatgccacccaccaacactgtgttttggccggttcacaacctcggtttagttccacccaccgagtggcagagtgctcaacaggaaccttggattatattttacaacgctgtcagttggctctgcagaatgtctgtgacgatgtggacaatgatgatgtctctttgaaatcctttgagcctgcagttttgaaacaaggagaagaaattcataatgaggtcgagtttgagtggctgaggcagttttggtttcaaggcaatcgatacagaaagtgcactgactggtggtgtcaacccatggctcaactggaagcactgtggaagaagatggagggtgtgacaaatgctgtgcttcatgaagttaaaagagaggggctccccgtggaacaaaggaatgaaatcttgactgccatccttgcctcgctcactgcacgccagaacctgaggagagaatggcatgccaggtgccagtcacgaattgcccgaacattacctgctgatcagaagccagaatgtcggccatactgggaaaaggatgatgcttcgatgcctctgccgtttgacctcacagacatcgtttcagaactcagaggtcagcttctggaagcaaaaccctagaaggagcacaagtctcaggcggaggagaaaaagagatcggcttttctcctccaacgttgtcatgggcttaagcaagagcagtggagacttctcttggcccctagattgtagcacccgggtcccaatccaaaacagctaggaaatggtgcccatgaagttttaaatgttttaaaatgaccctgtgttatagtctgatttggtgttaaacaggaccttcttcccccaaaattgttcagattataaaatgtgagccattcagcccccaaggtccagggcaggcgacaggaacgagcccagcgtgtgacaaagcctaacctactttcctctttcccaagctttttcagagactctggagtggacccagccctctggggaaagacagaacttagagacatcccagttactcaccacacccatagtgctgtccaatatggtagccactagctagctgtggctacttcaatttaaattcagttttaattttaattaaaaatgcagctcttcagtcgccctggccacatttcaagtgcttaacagcctcatgtggctagtgactgctgtattggacggtacagatatggaacattttcatcatcgaagaaagtcctattggacaacacttctataaaaagtttgagagcaggaattctcatttccattcgtctgtagcttctatccccaaaggcaaagaaactaaaagagaaatgactcattgaagattggcctctttcctttctctaagacaaacctaagtaaaagcctgagctttgagtcctatgctcagcacacgggaaggagatgttaataattaaaataaagttgatatcctgtctttagggagttcccttgatctcttgaaagagacacagccccatttacattatttcgtggatttcaccagcatagtatagtttttttctgtaagtccctcattcttatgtaataacaggtggaactgaggtttgaagaacctcagtggcccatcctgatgacattggagactcaaagagacaagagagagtagggtttaaaacctgagctttaagactcccactagcttcgtgtcctttggcatgttaacgtgcctcagtttcctcatctgtataatggggatatatgaaaggcaccagtcctaaggtgaacattaagtgagatgattctagttacagacttagaacaatttccagcacatagttaaatatccaggaaattctggtactgttatgtgtgggtgagctgacctggatgtagatgttttcctctctcttgctgacccctccgccagttttgtcttgtgatgccattaacacatctctccctttctgacctggctcctgcccattggtgtcccaagaaatcgtgagaatagttagccccccgtctccccagcctgttgctttctcgtgtagttgttcacagtagttgagaagttgaagagcttttgcctattgaaggtgcactgagaataaactctttcctgccaccagaattgcagtggttcacggcctgcactcattcccatgaatgcagttaatagccacagaaatgtcacattaagcaaagcagccagggtctcatcgtgttgagactcgagtctctcagaccttggattcattccctggtgtctttgagcctcagtttcctcattggtaaaagagaagtgaagcagtgtctcacagggtcattacagagattaaatgaaataaatgaaataacatagaccaggagggcgtggtgtttaaaagtcacagatggggcaccctcgggccatccagcccagtgttttctttagcccctatgatgttcattttttgttatatcccattaggtgcccatatttaaaaattgggagatttcacataaaattaaaaggtctgcattttcttttttcttttctttttttttttttttgagacacagtctcactctgtcaccaggctagagtgcagtggcacgatctcagctcactgcaacctctgcctcccaggttcaagtaattctcctgcctcagcctcccaagtagctgggactacaggcacgtgccaccacgcccagctaatttttgtatttttagcagagatggggtttcaccacattggccaggatggtctcgatctcaacctcgtgatccacccacctcggtctcccaaagcgctgggattacaggcgtgagccaccgcgccaagccaaggtctgcatttttctttagaactcagaacacccaatagtcctaggcccccatcctcgcatggcagcaagctaaataagcatcttcccactgcgagttggggcatgacccagcctatggtttgccatactccctctttttctccgttttttcattaattgtgaacctgacctgcatcaccctttcatgtcagtgctctccaaacctgcttgcttgcacccctctagtcgaaatattttgtgcttaccccaatatatgtgtgtgactattgaactctattcgtagactgcttgtactaatgtcatttgcatcataaaatattcatatccaataaacatattaaaaggatgagataagaaaccgaaaaaaaaaaaaaaaaaaaaaa

SEQ ID NO: 2287 - DNA, 1348 bp, Homo sapiens
ccagatttggctttatatagcggacccgtaaggccgaccggcctctaccggcgggatttgatggcgtgatgtctcacagaaagttctccgctcccagacatgggtccctcggcttcctgcctcggaagcgcagcagcaggcatcgtgggaaggtgaagagcttccctaaggatgacccgtccaagccggtccacctcacagccttcctgggatacaaggctggcatgactcacatcgtgcgggaagtcgacaggccgggatccaaggtgaacaagaaggaggtggtggaggctgtgaccattgtagagacaccacccatggtggttgtgggcattgtgggctacgtggaaacccctcgaggcctccggaccttcaagactgtctttgctgagcacatcagtgatgaatgcaagaggcgtttctataagaattggcataaatctaagaagaaggcctttaccaagtactgcaagaaatggcaggatgaggatggcaagaagcagctggagaaggacttcagcagcatgaagaagtactgccaagtcatccgtgtcattgcccacacccagatgcgcctgcttcctctgcgccagaagaaggcccacctgatggagatccaggtgaacggaggcactgtggccgagaagctggactgggcccgcgagaggcttgagcagcaggtacctgtgaaccaagtgtttgggcaggatgagatgatcgacgtcatcggggtgaccaagggcaaaggctacaaaggggtcaccagtcgttggcacaccaagaagctgccccgcaagacccaccgaggcctgcgcaaggtggcctgtattggggcatggcatcctgctcgtgtagccttctctgtggcacgcgctgggcagaaaggctaccatcaccgcactgagatcaacaagaagatttataagattggccagggctaccttatcaaggacggcaagctgatcaagaacaatgcctccactgactatgacctatctgacaagagcatcaaccctctgggtggctttgtccactatggtgaagtgaccaatgactttgtcatgctgaaaggctgtgtggtgggaaccaagaagcgggtgctcaccctccgcaagtccttgctggtgcagacgaagcggcgggctctggagaagattgaccttaagttcattgacaccacctccaagtttggccatggccgcttccagaccatggaggagaagaaagcattcatgggaccactgaagaaagaccgaattgcaaaggaagaaggagcttaatgccaggaacagattttgcagttggtggggtctcaataaaagttattttccactgacaaaaaaaaaaa

SEQ ID NO: 2288 - DNA, 3191 bp, Homo sapiens
aataagcatgaatacgacctggctacctgaaggaggtaggacggggaaccgagcagcagcaggtggtggaatgccagggaaatccaaccgtgcttcccacgctggcatcgctctgattatgaccaatcctctaatcttattctcacaattagggaggaagaaaaaaaaacaaacccaaaccaaaaaagaagttggtaggtgactctgtgagactactgttttataaagggagcgtttccttttataaaatttagctgagcagatgctaggcagcccacaggaggccactattcccctcagctgtacagtttgggaaaatacctacacacccggagaacagagagcttggtgtgtgttgagttcgctcctgttcatcagcagccctttccccgcctctggccaccagggggacctgcaaccaagtatgtgttctttcaggcgagcgggaacgcgtctgcataaatctagtccaatccagggccccgtagcaaggcgccaaagctgggggaagcgcatttctgttctctcgcgagcacgacgcggtgcctcccagtcctcctccggccctccctctccgccctcccggcccgcgagcgctcgggccccttccagtggctcgcggcaggtggcgctgtctgcggcgtcgcagcggcccgggctgcagcagagacgatctcccggcgggctgtgcggcccggctctccggcggcagcgagtgccacgtcccaagtgctacgcggaggattagagcaggcggtgcgctgggggcgggagcagcgcggagcccggctcggccacaccgatcgcccgccgccatgggctcctcgcaaagcgtcgagatcccgggcgggggcaccgagggctaccacgttctgcgggtacaagaaaattccccaggacacagagctggtttggagcctttctttgattttattgtttctattaatggttcaagattaaataaagacaatgacactcttaaggatctgctgaaagcaaacgttgaaaagcctgtaaagatgcttatctatagcagcaaaacattggaactgcgagagacctcagtcacaccaagtaacctgtggggcggccagggcttattgggagtgagcattcgtttctgcagctttgatggggcaaatgaaaatgtttggcatgtgctggaggtggaatcaaattctcctgcagcactggcaggtcttagaccacacagtgattatataattggagcagatacagtcatgaatgagtctgaagatctattcagccttatcgaaacacatgaagcaaaaccattgaaactgtatgtgtacaacacagacactgataactgtcgagaagtgattattacaccaaattctgcatggggtggagaaggcagcctaggatgtggcattggatatggttatttgcatcgaatacctacacgcccatttgaggaaggaaagaaaatttctcttccaggacaaatggctggtacacctattacacctcttaaagatgggtttacagaggtccagctgtcctcagttaatcccccgtctttgtcaccaccaggaactacaggaattgaacagagtctgactggactttctattagctcaactccaccagctgtcagtagtgttctcagtacaggtgtaccaacagtaccgttattgccaccacaagtaaaccagtccctcacttctgtgccaccaatgaatccagctactacattaccaggtctgatgcctttaccagcaggactgcccaacctccccaacctcaacctcaacctcccagcaccacacatcatgccaggggttggcttaccagaacttgtaaacccaggtctgccacctcttccttccatgcctccccgaaacttacctggcattgcacctctccccctgccatccgagttcctcccgtcattccccttggttccagagagctcttctgcagcaagctcaggagagctgctgtcttccctcccgcccaccagcaacgcaccctccgaccctgccacaactactgcaaaggcagacgctgcctcctcactcactgtggatgtgacgccccccactgccaaggcccccaccaccgttgaggacagagtcggcgactccaccccagtcagcgagaagcctgtttctgcggctgtggatgccaatgcttctgagtcaccttaactttgaaccattctttggaattggcgtggtatatttaaccacgggagcgtgtctggaaacgcaaactatcattaatttcatactagtttgtaccgtatctgtaggcatcctgtaaataattccaaggggaaaactaaacgaggacgtgggttgtatcctgccaggttgagtggggctcacacgctagggtgagatgtcagaaagcgcttgtattttaaacaaccaaaaagaattgtaagggtggcttgctgccaggcttgcactgccgttcctgggggtgtgcatcttcgggaaaggtggtggcggggcgtccactaggtttcctgtcccctgctgctccttccgtaagaaaatgaaatattctatgcctaatactcacacgcaacatttcttgtactttgtaagtcgtttgcgagaatgcagaccacctcactaaactgtaaacggtaaagagatttttacttttggtctccgtgagtcgcatctctactaaggtttacacaggaattccacctgaagacttgtgttaaagttctacagcgcgcactgttaactgaacgtctttttcttcagcctatacgcggatccttgttttgagctctcagaatcactcagacaacattttgtaactgctgctgttgctttctacatacaccttataaagtgacatttcaaaagaaataaggtgccacagttttaaaccagaaggtggcactctgtggctccttgtagtattatagctatactgggaaagcatagatacagcaataaagtacagtaattttactttttttcttgtgttacatctaaattacaacccttaattgccacgtgtgcacttactactctccagtatgtcttattactctccagtatgtcacgcatctttaacttttcacgtcctatgtttgctttctcccatttttaagagatggtaagttaactggaattgatttactgaatgaaattaaatgcagatatccctgtttttgaaataagacaaaaaaaaaaaaaaaa

SEQ ID NO: 2289 - DNA, 4635 bp, Homo sapiens; identical to SEQ ID NO: 2192

SEQ ID NO: 2290 - DNA, 1348 bp, Homo sapiens; identical to SEQ ID NO: 2287

SEQ ID NO: 2291 - DNA, 2880 bp, Homo sapiens
aggttcaaaacattcagagacagaaggtggatagacaaatctccaccttcagactggtaggctcctccagaagccatcagacaggaagatgtgaaaatccccagcactcatcccagaatcactaagtggcacctgtcctgggccaaagtcccaggacagacctcattgttcctctgtgggaatacctccccaggagggcatcctggatttcccccttgcaacccaggtcagaagtttcatcgtcaaggttgtttcatcttttttttcctgtctaacagctctgactaccacccaaccttgaggcacagtgaagacatcggtggccactccaataacagcaggtcacagctgctcttctggaggtgtcctacaggtgaaaagcccagcgacccagtcaggatttaagtttacctcaaaaatggaagattttaacatggagagtgacagctttgaagatttctggaaaggtgaagatcttagtaattacagttacagctctaccctgcccccttttctactagatgccgccccatgtgaaccagaatccctggaaatcaacaagtattttgtggtcattatctatgccctggtattcctgctgagcctgctgggaaactccctcgtgatgctggtcatcttatacagcagggtcggccgctccgtcactgatgtctacctgctgaacctagccttggccgacctactctttgccctgaccttgcccatctgggccgcctccaaggtgaatggctggatttttggcacattcctgtgcaaggtggtctcactcctgaaggaagtcaacttctatagtggcatcctgctactggcctgcatcagtgtggaccgttacctggccattgtccatgccacacgcacactgacccagaagcgctacttggtcaaattcatatgtctcagcatctggggtctgtccttgctcctggccctgcctgtcttacttttccgaaggaccgtctactcatccaatgttagcccagcctgctatgaggacatgggcaacaatacagcaaactggcggatgctgttacggatcctgccccagtcctttggcttcatcgtgccactgctgatcatgctgttctgctacggattcaccctgcgtacgctgtttaaggcccacatggggcagaagcaccgggccatgcgggtcatctttgctgtcgtcctcatcttcctgctctgctggctgccctacaacctggtcctgctggcagacaccctcatgaggacccaggtgatccaggagacctgtgagcgccgcaatcacatcgaccgggctctggatgccaccgagattctgggcatccttcacagctgcctcaaccccctcatctacgccttcattggccagaagtttcgccatggactcctcaagattctagctatacatggcttgatcagcaaggactccctgcccaaagacagcaggccttcctttgttggctcttcttcagggcacacttccactactctctaagacctcctgcctaagtgcagccccgtggggttcctcccttctcttcacagtcacattccaagcctcatgtccactggttcttcttggtctcagtgtcaatgcagcccccattgtggtcacaggaagtagaggaggccacgttcttactagtttcccttgcatggtttagaaagcttgccctggtgcctcaccccttgccataattactatgtcatttgctggagctctgcccatcctgcccctgagcccatggcactctatgttctaagaagtgaaaatctacactccagtgagacagctctgcatactcattaggatggctagtatcaaaagaaagaaaatcaggctggccaacggggtgaaaccctgtctctactaaaaatacaaaaaaaaaaaaaaattagccgggcgtggtggtgagtgcctgtaatcacagctacttgggaggctgagatgggagaatcacttgaacccgggaggcagaggttgcagtgagccgagattgtgcccctgcactccagcctgagcgacagtgagactctgtctcagtccatgaagatgtagaggagaaactggaactctcgagcgttgctgggggggattgtaaaatggtgtgaccactgcagaagacagtatggcagctttcctcaaaacttcagacatagaattaacacatgatcctgcaattccacttataggaattgacccacaagaaatgaaagcagggacttgaacccatatttgtacaccaatattcatagcagcttattcacaagacccaaaaggcagaagcaacccaaatgttcatcaatgaatgaatgaatggctaagcaaaatgtgatatgtacctaacgaagtatccttcagcctgaaagaggaatgaagtactcatacatgttacaacacggacgaaccttgaaaactttatgctaagtgaaataagccagacatcaacagataaatagtttatgattccacctacatgaggtactgagagtgaacaaatttacagagacagaaagcagaacagtgattaccagggactgaggggaggggagcatgggaagtgacggtttaatgggcacagggtttatgtttaggatgttgaaaaagttctgcagataaacagtagtgatagttgtaccgcaatgtgacttaatgccactaaattgacacttaaaaatggtttaaatggtcaattttgttatgtatattttatatcaatttaaaaaaaaacctgagccccaaaaggtattttaatcaccaaggctgattaaaccaaggctagaaccacctgcctatattttttgttaaatgatttcattcaatatcttttttttaataaaccatttttacttgggtgtttataaaaaaaaaaa

SEQ ID NO: 2292 - DNA, 2276 bp, Homo sapiens
ctcattgaactcgcctgcagctcttgggttttttgtggcttccttcgttattggagccaggcctacaccccagcaaccatgtccaagggacctgcagttggtattgatcttggcaccacctactcttgtgtgggtgttttccagcacggaaaagtcgagataattgccaatgatcagggaaaccgaaccactccaagctatgtcgcctttacggacactgaacggttgatcggtgatgccgcaaagaatcaagttgcaatgaaccccaccaacacagtttttgatgccaaacgtctgattggacgcagatttgatgatgctgttgtccagtctgatatgaaacattggccctttatggtggtgaatgatgctggcaggcccaaggtccaagtagaatacaagggagagaccaaaagcttctatccagaggaggtgtcttctatggttctgacaaagatgaaggaaattgcagaagcctaccttgggaagactgttaccaatgctgtggtcacagtgccagcttactttaatgactctcagcgtcaggctaccaaagatgctggaactattgctggtctcaatgtacttagaattattaatgagccaactgctgctgctattgcttacggcttagacaaaaaggttggagcagaaagaaacgtgctcatctttgacctgggaggtggcacttttgatgtgtcaatcctcactattgaggatggaatctttgaggtcaagtctacagctggagacacccacttgggtggagaagattttgacaaccgaatggtcaaccattttattgctgagtttaagcgcaagcataagaaggacatcagtgagaacaagagagctgtaagacgcctccgtactgcttgtgaacgtgctaagcgtaccctctcttccagcacccaggccagtattgagatcgattctctctatgaaggaatcgacttctatacctccattacccgtgcccgatttgaagaactgaatgctgacctgttccgtggcaccctggacccagtagagaaagcccttcgagatgccaaactagacaagtcacagattcatgatattgtcctggttggtggttctactcgtatccccaagattcagaagcttctccaagacttcttcaatggaaaagaactgaataagagcatcaaccctgatgaagctgttgcttatggtgcagctgtccaggcagccatcttgtctggagacaagtctgagaatgttcaagatttgctgctcttggatgtcactcctctttcccttggtattgaaactgctggtggagtcatgactgtcctcatcaagcgtaataccaccattcctaccaagcagacacagaccttcactacctattctgacaaccagcctggtgtgcttattcaggtttatgaaggcgagcgtgccatgacaaaggataacaacctgcttggcaagtttgaactcacaggcatacctcctgcaccccgaggtgttcctcagattgaagtcacttttgacattgatgccaatggtatactcaatgtctctgctgtggacaagagtacgggaaaagagaacaagattactatcactaatgacaagggccgtttgagcaaggaagacattgaacgtatggtccaggaagctgagaagtacaaagctgaagatgagaagcagagggacaaggtgtcatccaagaattcacttgagtcctatgccttcaacatgaaagcaactgttgaagatgagaaacttcaaggcaagattaacgatgaggacaaacagaagattctggacaagtgtaatgaaattatcaactggcttgataagaatcagactgctgagaaggaagaatttgaacatcaacagaaagagctggagaaagtttgcaaccccatcatcaccaagctgtaccagagtgcaggaggcatgccaggaggaatgcctgggggatttcctggtggtggagctcctccctctggtggtgcttcctcagggcccaccattgaagaggttgattaagccaaccaagtgtagatgtagcattgttccacacatttaaaacatttgaaggacctaaattcgtagcaaattctgtggcagttttaaaaagttaagctgctatagtaagttactgggcattctcaatacttgaatatggaacatatgcacaggggaaggaaataacattgcactttataaacactgtattgtaagtggaaaatgcaatgtcttaaataaaactatttaaaattggcaccataaaaaaaaaaaaaaaa

SEQ ID NO: 2293 - DNA, 3757 bp, Homo sapiens
aggcctaagcgcggccgccgtggctcctgcgtctcccatcgtgccgtgcgtcccgcgccgcgttcgagttctcggaggggagggggcgttagccccgcgcagccgccggcgtcgccgccatggacctaggacccttgaacatctgtgaagaaatgactattctgcatggaggcttcttgctggccgagcagctgttccaccctaaggcactggcagaattaacaaagtctgactgggaacgtgttggacggcccatcgtggaggccttaagggagatctcctcggctgcagcacactcccagccctttgcctggaagaagaaagccctgatcatcatctgggccaaggttctgcagccgcaccccgtgaccccgtccgacacagagacacggtggcaggaagacctgttcttctcggtgggcaacatgatccccaccatcaaccacaccatcctcttcgagctgctcaaatccctggaagcttctggactctttatccagctcctgatggccctgcccaccaccatctgccatgcagaactagagcgctttctggaacatgtgaccgttgacacttctgccgaagacgtggccttcttcctggacgtctggtgggaggtgatgaagcacaagggtcacccgcaggaccccctgctctcccagtttagtgcaatggcccataagtacctgcctgccttagatgagttcccccatcctccaaagaggcttaggtcagacccagacgcgtgccccaccatgcccctgttggccatgctgctccgcgggctgacacagatccagagtcggatcctgggcccggggaggaagtgctgtgcgctggccaacctggctgacatgctgactgtgtttgcgctgacagaggacgacccccaggaggtgtctgcaaccgtgtatctggacaaactggccacggtgatctctgtgtggaactcggacacccagaatccctaccaccagcaggcgctggcagagaaggtgaaggaggcagaacgggatgtcagcctgacctcgctggccaaactccccagtgagaccattttcgtgggctgcgagttcctgcaccacctgctgcgggagtggggggaggagttgcaggccgtgctccgcagcagccaggggacaagttacgacagctaccggctgtgcgacagtctgacttccttcagccagaacgcgacgctctacctgaaccgcaccagcctgtccaaggaggacaggcaggtggtctctgagctggcggagtgtgtcagggacttcctgaggaaaacgagcacggtgctgaagaacagggccttggaggatatcacagcttccattgccatggccgtcatccagcagaagatggaccgccatatggaagtgtgctacatttttgcctctgagaagaagtgggccttctcggacgagtgggtagcctgcctggggagtaacagggccctcttccgacagccagacttggtgttgaggctgctggaaacagtgatagacgtcagcacagctgacagagccatccctgagtctcagatccggcaggtgatccacctgatcctggaatgttacgcagacctctccctgccaggtaaaaataaagtccttgcaggtatcctgcgttcctgggggcgaaagggcctctctgaaaagttgctggcttatgtggagggttttcaggaagacctcaatacaacttttaaccagctcactcagagtgcctccgaacagggcttggcaaaagctgtggcctccgtggcccgcctggtcatagtgcacccggaagtcacggtgaagaaaatgtgcagcctggctgtggtcaatctcggcacccacaagttcctggcccagattctcactgccttccctgcccttaggtttgtggaagagcagggtcccaattcatctgccactttcatggtgtcatgcctcaaagaaaccgtctggatgaagttctctacacccaaggaagaaaagcaatttttagagctcctgaactgcctgatgagtcccgtgaaaccccaagggattccagtggctgctcttcttgagccagacgaggtgctgaaggaatttgtcctgcctttcttgaggttagatgttgaagaggtagacctcagtctgaggatcttcatccagactctagaggcaaacgcgtgccgagaggaatactggctccagacctgctccccgtttccactcctcttcagcttgtgccagctcttggaccgcttcagcaaatactggcagcttcccaaggagaagcggtgcctctctttggataggaaggatctagcgatccatatcctggagctcctgtgtgagattgtatcagccaatgctgagaccttctccccggatgtctggatcaagtccctgtcctggctccaccgcaagttagaacagctagactggactgtgggcctgaggctgaagagcttcttcgaggggcacttcaagtgtgaagtgccagccacactttttgagatctgtaagctttcagaagacgagtggacctcccaggcccacccagggtacggggctggcacggggctcctggcctggatggagtgctgctgcgtctccagcggcatctcggagaggatgctgtctctcttggtggtggacgtgggcaatcctgaggaggtcagactgttcagcaaaggctttctggtggccctggtgcaagtcatgccttggtgcagccctcaggagtggcagcgccttcaccagctgaccaggagactgctggagaagcagctcctccatgtcccttatagcctggaatatattcagtttgttcccctgctcaacctgaagccctttgcccaggagttgcaactctccgtcctcttcctgaggactttccagtttctctgcagccatagctgtcgtgattggcttcctctggaaggctggaaccacgtggtcaaactcctctgtggcagtctgacccgcctcctggactcagtcagggcgatacaggcagctggcccttgggttcaaggaccagagcaggacctgacccaggaagccctgtttgtttacacccaggtgttctgccatgctctgcacatcatggccatgctccacccggaggtctgtgagccactctacgttttagccttggaaaccctcacctgctatgagactttgagcaagaccaacccttctgtcagctccttgctccagagggcacacgagcagcgcttcttaaagtccattgctgagggcatcggccctgaagaacggcgccaaaccctgttgcagaagatgagcagcttctgacttggcgtggggagctgggccccaacatggcgggtctgcagaagatcagcagcttcttacctgtgcgggagcgaaaaagctgggcttcaacatggcaggtctgtaggggtcagacccgagcagcctggactttacagttatgtgaaactgtccacaaaaagtcatggcaataatggtgtaaagaaaatagtttcttgggtatttgtaacgtacaaactatcataaaaattctcctctttcgcatctcactttgtctcttctaagtcggcctcagcaatagcccaggattaaatatgctctgaaattgggtttagtgtcttcaagatcaaatccagccaggaggaacatgttcataactggacttttccatcctagattttggcaaataagcccaaagttgaaaccatgtgagtggaaaaagcattacatggtacgtataacccccaaaaaaaaaaaaaaaa

SEQ ID NO: 2294 - DNA, 4345 bp, Homo sapiens
actgaaactaggggcaaggagacgaagagaacatgaaagttaaactttaagatgaagaacaaagctgaacatactgatgcattggatctttggagaggatctcagaactcattgtacttaatttacaggctaaaaccttagaagaggaatttattatatcctacacaagactccagggaagcacatggccttggactgaaggctggcatctggaagctgtcagccaccagcaccttctgcagcaggaaaaggccagggctctgctggagcaggcagcagagtggacgcacagtaacatgggcaacttgaagagcgtggcccaggagcctgggccaccctgcggcctggggctggggctgggccttgggctgtgcggcaagcagggcccagccaccccggcccctgagcccagccgggccccagcatccctactcccaccagcgccagaacacagccccccgagctccccgctaacccagcccccagaggggcccaagttccctcgtgtgaagaactgggaggtggggagcatcacctatgacaccctcagcgcccaggcgcagcaggatgggccctgcaccccaagacgctgcctgggctccctggtatttccacggaaactacagggccggccctcccccggccccccggcccctgagcagctgctgagtcaggcccgggacttcatcaaccagtactacagctccattaagaggagcggctcccaggcccacgaacagcggcttcaagaggtggaagccgaggtggcagccacaggcacctaccagcttagggagagcgagctggtgttcggggctaagcaggcctggcgcaacgctccccgctgcgtgggccggatccagtgggggaagctgcaggtgttcgatgcccgggactgcaggtctgcacaggaaatgttcacctacatctgcaaccacatcaagtatgccaccaaccggggcaaccttcgctcggccatcacagtgttcccgcagcgctgccctggccgaggagacttccgaatctggaacagccagctggtgcgctacgcgggctaccggcagcaggatggctctgtgcggggggacccagccaacgtggagatcaccgagctctgcattcagcacggctggaccccaggaaacggtcgcttcgacgtgctgcccctgctgctgcaggccccagatgatcccccagaactcttccttctgccccccgagctggtccttgaggtgcccctggagcaccccacgctggagtggtttgcagccctgggcctgcgctggtacgccctcccggcagtgtccaacatgctgctggaaattgggggcctggagttccccgcagcccccttcagtggctggtacatgagcactgagatcggcacgaggaacctgtgtgaccctcaccgctacaacatcctggaggatgtggctgtctgcatggacctggatacccggaccacctcgtccctgtggaaagacaaggcagcagtggaaatcaacgtggccgtgctgcacagttaccagctagccaaagtcaccatcgtggaccaccacgccgccacggcctctttcatgaagcacctggagaatgagcagaaggccagggggggctgccctgcagactgggcctggatcgtgccccccatctcgggcagcctcactcctgttttccatcaggagatggtcaactatttcctgtccccggccttccgctaccagccagacccctggaaggggagtgccgccaagggcaccggcatcaccaggaagaagacctttaaagaagtggccaacgccgtgaagatctccgcctcgctcatgggcacggtgatggcgaagcgagtgaaggcgacaatcctgtatggctccgagaccggccgggcccagagctacgcacagcagctggggagactcttccggaaggcttttgatccccgggtcctgtgtatggatgagtatgacgtggtgtccctcgaacacgagacgctggtgctggtggtaaccagcacatttgggaatggggatcccccggagaatggagagagctttgcagctgccctgatggagatgtccggcccctacaacagctcccctcggccggaacagcacaagagttataagatccgcttcaacagcatctcctgctcagacccactggtgtcctcttggcggcggaagaggaaggagtccagtaacacagacagtgcaggggccctgggcaccctcaggttctgtgtgttcgggctcggctcccgggcatacccccacttctgcgcctttgctcgtgccgtggacacacggctggaggaactgggcggggagcggctgctgcagctgggccagggcgacgagctgtgcggccaggaggaggccttccgaggctgggcccaggctgccttccaggccgcctgtgagaccttctgtgtgggagaggatgccaaggccgccgcccgagacatcttcagccccaaacggagctggaagcgccagaggtaccggctgagcgcccaggccgagggcctgcagttgctgccaggtctgatccacgtgcacaggcggaagatgttccaggctacaatccgctcagtggaaaacctgcaaagcagcaagtccacgagggccaccatcctggtgcgcctggacaccggaggccaggaggggctgcagtaccagccgggggaccacataggtgtctgcccgcccaaccggcccggccttgtggaggcgctgctgagccgcgtggaggacccgccggcgcccactgagcccgtggcagtagagcagctggagaagggcagccctggtggccctccccccggctgggtgcgggacccccggctgcccccgtgcacgctgcgccaggctctcaccttcttcctggacatcacctccccacccagccctcagctcttgcggctgctcagcaccttggcagaagagcccagggaacagcaggagctggaggccctcagccaggatccccgacgctacgaggagtggaagtggttccgctgccccacgctgctggaggtgctggagcagttcccgtcggtggcgctgcctgccccactgctcctcacccagctgcctctgctccagccccggtactactcagtcagctcggcacccagcacccacccaggagagatccacctcactgtagctgtgctggcatacaggactcaggatgggctgggccccctgcactatggagtctgctccacgtggctaagccagctcaagcccggagaccctgtgccctgcttcatccggggggctccctccttccggctgccacccgatcccagcttgccctgcatcctggtgggtccaggcactggcattgcccccttccggggattctggcaggagcggctgcatgacattgagagcaaagggctgcagcccactcccatgactttggtgttcggctgccgatgctcccaacttgaccatctctaccgcgacgaggtgcagaacgcccagcagcgcggggtgtttggccgagtcctcaccgccttctcccgggaacctgacaaccccaagacctacgtgcaggacatcctgaggacggagctggctgcggaggtgcaccgcgtgctgtgcctcgagcggggccacatgtttgtctgcggcgatgttaccatggcaaccaacgtcctgcagaccgtgcagcgcatcctggcgacggagggcgacatggagctggacgaggccggcgacgtcatcggcgtgctgcgggatcagcaacgctaccacgaagacattttcgggctcacgctgcgcacccaggaggtgacaagccgcatacgcacccagagcttttccttgcaggagcgtcagttgcggggcgcagtgccctgggcgttcgaccctcccggctcagacaccaacagcccctgagagccgcctggctttcccttccagttccgggagagcggctgcccgactcaggtccgcccgaccaggatcagccccgctcctcccctcttgaggtggtgccttctcacatctgtccagaggctgcaaggattcagcattattcctccaggaaggagcaaaacgcctcttttccctctctaggcctgttgcctcgggcctgggtccgccttaatctggaaggcccctcccagcagcggtaccccagggcctactgccacccgcttcctgtttcttagtcgaatgttagattcctcttgcctctctcaggagtatcttacctgtaaagtctaatctctaaatcaagtatttattattgaagatttaccataagggactgtgccagatgttaggagaactactaaagtgcctaccccagctcatgtggattacaaaaaaaa

SEQ ID NO: 2295 - DNA, 3036 bp, Homo sapiens; identical to SEQ ID NO: 1732

SEQ ID NO: 2296 - DNA, 2515 bp, Homo sapiens
ccctatcccgtcttgctctgcggcgcaggggcaagatggctgctgagaagcaggtcccaggcggcggcggcggcggcggcagtggcggcggcggtggcagtggcggcggcggtagcggcggtggacgtggtgccggaggggaagaaaataaagaaaacgaacgcccttcggccggatcgaaggcaaacaaagaatttggggatagcctgagtttggagattcttcagattattaaggaatcccagcagcagcatggtttacggcatggagattttcagaggtacaggggctactgttcccgtagacaaagacgtcttcgaaaaacactcaacttcaagatgggtaacagacacaaattcacagggaagaaagtgactgaagagcttctgaccgataatagatacttgcttctggttctgatggatgctgaaagagcctggagctacgccatgcagctgaaacaggaagccaacactgaaccccgaaaacggtttcacttgttatctcgcctacgcaaagccgtgaagcatgcagaggaattggaacgcttgtgtgagagcaatcgcgtggatgccaagaccaaattagaggctcaggcttacacagcttacctctcaggaatgctacgttttgaacatcaagaatggaaagctgccattgaggcttttaacaaatgcaaaactatctatgagaagctagccagtgctttcacagaggagcaggctgtgctgtataaccaacgtgtggaagagatttcacccaacatccgctattgtgcatataatattggggaccagtcagccatcaatgaactcatgcagatgagattgaggtctgggggcactgagggtctcttggctgaaaaattggaggctttgatcactcagactcgagccaaacaggcagctaccatgagtgaagtggagtggagagggagaacggttccagtgaagattgacaaagtgcgcattttcttattaggactggctgataacgaagcagctattgtccaggctgaaagcgaagaaactaaggagcgcctgtttgaatcaatgctcagcgagtgtcgggacgccatccaggtggttcgggaggagctcaagccagatcagaaacagagagattatatccttgaaggagagccagggaaggtgtctaatcttcaatacttgcatagctacctgacttacatcaagctatcaacggcaatcaagcgtaatgagaacatggccaaaggtctgcagagggctctgctgcagcagcagccagaggatgacagcaagcgctcaccccggccccaggacctgatccgactctatgacatcatcttacagaatctggtggaattgctccagcttcctggtttagaggaagacaaagccttccagaaagagataggcctcaagactctggtgttcaaagcttacaggtgttttttcattgctcagtcctatgtgctggtgaagaagtggagcgaagcccttgtcctgtatgacagagtcctgaaatatgcaaatgaagtaaattctgatgctggcgccttcaagaacagcctaaaggacctgcctgatgtgcaagagctcatcactcaagtgcggtcagagaagtgctccctgcaggccgcagccatccttgatgcaaacgacgctcatcaaacagagacctcctcctcccaagtcaaggacaataagcctctggttgaacggtttgagacattctgcctggacccttcccttgtcaccaagcaagccaaccttgtgcacttcccaccaggcttccagcccattccctgcaagcctttgttctttgacctggccctcaaccatgtggctttcccaccccttgaggacaagttggaacagaagaccaagagtggcctcactggatacatcaagggcatctttggattcaggagctaaccaggctcttcctcgggggcgggggagattctgactcttaatctgtattgtgagaaaatcccagcaagttccatgatattaaatccaggtctgcattggcccggggcaagagtttaacatcttcggccctgcattcctacatcttgtgtctgtacacgttcttaagcagcgtgtcaggagagcaccctgttgtcttctggtaaatgtgtgcagggtcatcctgtctcctgtacctcctgggaaaggggccgctgctgtctggtgccctgtgagctgtgattgattgcctttggtcagtaatgcgttcaggagtccacaccaggcacagatggggccttgaaacgctttgtcatgcttcttcagtaccatggatttgaaatgaactcatccttgctgtgagcatccaggagcccttgagaagtttatctatgactatgaaactggcaacgtcaccccagaattacggtcagccttattccccttcacctcccagtgaacgctaagaagtttcagacaagcagagagctctatttttagaagaaatatgttacactcagaaatgatgaaaccaaatcttatattaaaaggcaaagatg

SEQ ID NO: 2297 - DNA, 2034 bp, Homo sapiens
gcggccgcgggggcccctcagcggtttcccgaacggcccgactcgggcgctcctccgtgtcgcggtcgccgaccctccgcgtcccgccaacgccgccgctgcaccagtctccgggccgggctcggcgggccccgcagccgcagccatggggtgttggggtcggaaccggggccggctgctgtgcatgctggcgctgaccttcatgttcatggtgctggaggtggtggtgagccgggtgacctcgtcgctggcgatgctctccgactccttccacatgctgtcggacgtgctggcgctggtggtggcgctggtggccgagcgcttcgcccggcggacccacgccacccagaagaacacgttcggctggatccgagccgaggtaatgggggctctggtgaacgccatcttcctgactggcctctgtttcgccatcctgctggaggccatcgagcgcttcatcgagccgcacgagatgcagcagccgctggtggtccttggggtcggcgtggccgggctgctggtcaacgtgctggggctctgcctcttccaccatcacagcggcttcagccaggactccggccacggccactcgcacgggggtcacggccacggccacggcctccccaaggggcctcgcgttaagagcacccgccccgggagcagcgacatcaacgtggccccgggcgagcagggtcccgaccaggaggagaccaacaccctggtggccaataccagcaactccaacgggctgaaattggaccccgcagacccagaaaaccccagaagtggtgatacagtggaagtacaagtgaatggaaatcttgtcagagaacctgaccatatggaactggaagaagatagggctggacaacttaacatgcgtggagtttttctgcatgtccttggagatgccttgggttcagtgattgtagtagtaaatgccttagtcttttacttttcttggaaaggttgttctgaaggggatttttgtgtgaatccatgtttccctgacccctgcaaagcatttgtagaaataattaatagtactcatgcatcagtttatgaggctggtccttgctgggtgctatatttagatccaactctttgtgttgtaatggtttgtatacttctttacacaacctatccattacttaaggaatctgctcttattcttctacaaactgttcctaaacaaattgatatcagaaatttgataaaagaacttcgaaatgttgaaggagttgaggaagttcatgaattacatgtttggcaacttgctggaagcagaatcattgccactgctcacataaaatgtgaagatccaacatcatacatggaggtggctaaaaccattaaagacgtttttcataatcacggaattcacgctactaccattcagcctgaatttgctagtgtaggctctaaatcaagtgtagttccgtgtgaacttgcctgcagaacccagtgtgctttgaagcaatgttgtgggacactaccacaagccccttctggaaaggatgcagaaaagaccccagcagttagcatttcttgtttagaacttagtaacaatctagagaagaagcccaggaggactaaagctgaaaacatccctgctgttgtgatagagattaaaaacatgccaaacaaacaacctgaatcatctttgtgagtcttgaaaaagatgtgatatttgacttttgctttaaactgcaagaggaaaaagactccactgaaattctaagtttgccaagtagtgtaattgaagtccttgtctggtcacacagtttaattctatttttgtaagaacataatgggactgcataacagagttctatattacaattttgtgattattagtacagagtacagctatgctgtgactgttttggaaagccagttttaacactatgttacatttttgtttaaagtaagttaaaccttatataacataatgacatttgatttctggatttttcccatgataaaaattagggggataaataaaattgttactggaaaaaaaaaaaaaaaaaa

SEQ ID NO: 2298 - DNA, 5288 bp, Homo sapiens
aaccaaacaacccccaacagccaagcatacatctctaattttattattttggtcttttcgttggattttccctttcttctttttttcgggttatcgctcagttttgagcagaggtttacattttttaaaaatttgctttccagcccgccttgatcttctaagtgcgagttcatcgtctgagaaaaaaaaaaatctctggttggcgtttttgtttcttttcttttctttcttttctttcctttttttttttttttaatttttttcaagggggaggagattttccacaagaaaaggttgttttcatgtttgggattcaggaaagcatccaacggagtggaagcagcatgaaggaagagccgctgggcagcggcatgaacgcggtgcggacgtggatgcagggcgccggggtgctggacgccaacacggcggcgcagagcggggtgggtctggcccgggctcactttgagaagcagccgccttccaatctgcggaaatccaacttcttccacttcgtcctggccctctacgacagacagggccagcccgtggagatcgagaggacagcgtttgtggggttcgtggagaaggaaaaagaagccaacagcgaaaagaccaataacggaattcactaccggcttcagcttctctacagcaatgggataaggacggagcaggatttctacgtgcgcctcattgactccatgacaaaacaagccatagtgtatgaaggccaagacaagaacccagaaatgtgccgagtcttgctcacacatgagatcatgtgcagccgctgttgtgacaagaaaagctgtggcaaccgaaatgagactccctcagatccagtgataattgacaggttcttcttgaaatttttcctcaaatgtaaccaaaattgcctaaagaatgcgggaaacccacgtgacatgcggagattccaggtcgtggtgtctacgacagtcaatgtggatggccatgtcctggcagtctctgataacatgtttgtccataataattccaagcatgggcggagggctcggaggcttgacccctcggaaggtacgccctcttatctggaacatgctactccctgtatcaaagccatcagcccgagtgaaggatggacgacgggaggtgcgactgtgatcatcataggggacaatttctttgatgggttacaggtcatattcggtaccatgctggtctggagtgagttgatcactcctcatgccatccgtgtgcagacccctcctcggcacatccctggtgttgtggaagtcacactgtcctacaaatctaagcagttctgcaaaggaacaccaggcagattcatttatacagcgctcaacgaacccaccatcgattatggtttccagaggttacagaaggtcattcctcggcaccctggtgaccctgagcgtttgccaaaggaagtaatactcaaaagggctgcggatctggtagaagcactgtatgggatgccacacaacaaccaggaaatcattctgaagagagcggccgacattgccgaggccctgtacagtgttccccgcaaccacaaccaactcccggcccttgctaacacctcggtccacgcagggatgatgggcgtgaattcgttcagtggacaactggccgtgaatgtctccgaggcatcacaagccaccaatcagggtttcacccgcaactcaagcagcgtatcaccacacgggtacgtgccgagcaccactccccagcagaccaactataactccgtcaccacgagcatgaacggatacggctctgccgcaatgtccaatttgggcggctcccccaccttcctcaacggctcagctgccaactccccctatgccatagtgccatccagccccaccatggcctcctccacaagcctcccctccaactgcagcagctcctcgggcatcttctccttctcaccagccaacatggtctcagccgtgaaacagaagagtgctttcgcaccagtcgtcagaccccagacctccccacctcccacctgcaccagcaccaacgggaacagcctgcaagcgatatctggcatgattgttcctcctatgtgaaagaattgccttgaagaattgtattaatgaagaggttggattctgctacagagagtaatctgatacaagtcccagagtggaacttttaactcaggcctttttaagaggaatcacaataactgcagatttttaaacaaacaaaatcaccgaccttgcaaatactgaaattggaagagggatctgcaagtgcagggtgttggttaaagttgtacctcccaagtatttgggggatatatttattctgtattgacaaaagcaaatccactttttctttttcttttttttttttaagcttaattctgcaatcatttgtcttttataaaccgtaaagctctatacaagggacactataaataagactccatgttttaatttatgatgtttttaaagctgtgtaaaggaagaatgaagtggtgatatttacaaaaaagtaaaaaaaaaaaaaaagaaaaaaaggaaaaaaaaaaaagcttgtatgggacagaataggaatgccagttagattttttagaaaaactaagggtcggcttttgcgccttaaagcatatcaaatggtagttagctcagacagtgcattttcaatatctaacttaacatgccaccccttagcagtgcaagcttatttatctcttttgtattgttgtcttaagcaactgtgtaaataaatgcagcctggaaagttaaaacgcgatgtaagtgatcacatttttccctctactcgaaaatccagtgcctctagacagattgttaaaactgcatatttaaatctgatctcattctctccttttacttaagtcagtttcttctgaagccgatggcctctcgagagcttggtggcacacatactgtgtgagaatctcctttgagacttcatggaacagggtccaggcacagaattccacactctgccctccagttaacaagccaaaacctcacgtacgctcccccatttgcaagtttaaagtttactcgtcctaaatgcagacttcatacctatcttccaaaagttgataaaagcaacgtggcaggtattttcgattttcccattccagatactgcctctatcagtcgacccttaccatttgtaacataatagattgaaacaacaggttaagtgctttggaattaagagttaaagggaaccgggggtggagaaaggaaaagaaggttgagacctccaaaacatagttttctgttctatgggaatttttgctctcattatctgggaagtgttcttaaaaataagaattaatagcaaagatgcagcaaagctctgaggatgcatttgcctgatatttttttctttgctcttgtgtttttgtatgtagttataaatactgtagattttttttttgtgattttttgccaaagttgttgttctatttatacattttaatgtcttaagacattttttcaatatcacaaaaagattttactgcgtattttgcaaagaaaaaaagctcactacctttagcttgcacatacttgcaaagttaattaaaaggctttttgttttaaaggggattttgtaaaatatccatataaataatgtatttatctttcgaatttgtacattgcttttcccttcttcctcttccttccacccccaatttattttattgtgtatgtttgctacgtgaaaagtgcgtatttgtttggtcacctacacttgtattagctgtttcaatgtgatttttaaacatttcatttatagttatttttagtattgttataaaccatgcttcagtttttttaatttccacccaaaagtcattgtctatttttgtattatttgtaagttaagaagttttttccaatatatggcaaaaaaaaaaaaatagtagcatattattcttgtagtatttagttcagtagatttaaaaaaaaatgtatcctttgctttggaagcttacaaaacaaccctaatgctgttttactctattaatatgcatggaatctctccctttggagtgacgcattttgtgcattaaattctagggagaaacttcatagaaatcaatgaacatactttctttcttaagtctgcttgtatatttcctctgtctttcacataaatataaaccagcagattggatgccttaacaatgcaaatcatattcatttcacttgtacattgtaactgtgcaccagaactgtcagtcatcactaacattctaagaaaaaagaaaaagaaaaaaagaaaaaaaaaaaaacaaagaaatcgaaaagcacaaaagaactgttttgttaccttaagacaatgtaactttttctagtagagcaagaaatcatttacaacaatgctgcaactgtgcatgcccccatatggattttgcaatggttttcactaggctgtcaagagtgcgatttttatgggttggggtgggtgggggaggggagttgtgggagggtaggggagggaggaaagctgtttttcatggtgagaaataataatgatgactaataataataaaaaaaactggaaaatgtaagcaaggtggacgcattgcttctcggtactcagaaaggttatctgaatttgcgtggtaagcgctggcctgaagatgtacacaagttaaagccatattttatctggtgagccccttaactgtttctgaaggaatgaacggtcagccgggaaggtgtccggcttagaccttgacaacagacactacccatctgtcagccatgtgcagtggttagaactcttcttgaaagtccaaagagcctttaaaatgtgtataatttgtgttttgttgcttctatttctattgattagatgaaaagacattctggccctctgatcctctttcttctccacaaaagttttacaaataaaagatgttcccctaaatacagaatatggctttaagaagaaaatgaaatgaagaattaaattaagatttcagtgttgggggaaaaaatacagcttctggatgactggattgcataacattgccctggcctcacattgtactaggatgcagcttaaatgaagtcatctctaaatctactaacctttcaccttcttatcaaaactttttgaatagacacacactgtacagttcaattgttagagaacctaactactgtagagattgttaaattttttttttttttttgcaaaaattcaagctgtaaaaacttttcaactttcacaatatttaattaaagttacttcctgtctgtgatggcaaaaaaaaaaaaaaa

SEQ ID NO: 2299 - DNA, 3440 bp, Homo sapiens
gagaggccggcgtctctcccccagtttgccgttcacccggagcgctcgggacttgccgatagtggtgacggcggcaacatgtctgtggctttcgcggccccgaggcagcgaggcaagggggagatcactcccgctgcgattcagaagatgttggatgacaataaccatcttattcagtgtataatggactctcagaataaaggaaagacctcagagtgttctcagtatcagcagatgttgcacacaaacttggtataccttgctacaatagcagattctaatcaaaatatgcagtctcttttaccagcaccacccacacagaatatgcctatgggtcctggagggatgaatcagagcggccctcccccacctccacgctctcacaacatgccttcagatggaatggtaggtgggggtcctcctgcaccgcacatgcagaaccagatgaacggccagatgcctgggcctaaccatatgcctatgcagggacctggacccaatcaactcaatatgacaaacagttccatgaatatgccttcaagtagccatggatccatgggaggttacaaccattctgtgccatcatcacagagcatgccagtacagaatcagatgacaatgagtcagggacaaccaatgggaaactatggtcccagaccaaatatgagtatgcagccaaaccaaggtccaatgatgcatcagcagcctccttctcagcaatacaatatgccacagggaggcggacagcattaccaaggacagcagccacctatgggaatgatgggtcaagttaaccaaggcaatcatatgatgggtcagagacagattcctccctatagacctcctcaacagggcccaccacagcagtactcaggccaggaagactattacggggaccaatacagtcatggtggacaaggtcctccagaaggcatgaaccagcaatattaccctgatggtcataatgattacggttatcagcaaccgtcgtatcctgaacaaggctacgataggccttatgaggattcctcacaacattactacgaaggaggaaattcacagtatggccaacagcaagatgcataccagggaccacctccacaacagggatatccaccccagcagcagcagtacccagggcagcaaggttacccaggacagcagcagggctacggtccttcacagggtggtccaggtcctcagtatcctaactacccacagggacaaggtcagcagtatggaggatatagaccaacacagcctggaccaccacagccaccccagcagaggccttatggatatgaccagggacagtatggaaattaccagcagtgaaaaagtacttacattccagtagccagtatctattagcagccatattgtcacctcagcactgtggacacctccctgtgaagagatccttccattccatctagtttttggaaaaaccttgtggataagtggctgtttcatcagtaagcagcctttgtggtttagttataaaaggctttagtagctcaaaaatactcttgatttcacatttctactctagatggcaacattggacagaaaatgcaatgacataaccaatttgtaatgattttggaactgtgtttcaaatggactgttacagactgaaaggtgtgaacagctttgtatgtttatgaagggtaagggaatttaatacttttccacagatttttttgtaaggggaagagggaaatgtacactttttacagcagcaatattttgtatattatgtttatttcatgtggtgaatatgcaaggcggtacactacgcactggacagcatcagaaatcctctgttaatgtggactggagcatggtagatgcttgattgttttggtctcaaaatggtgtgctataaagataaaggtgaggggaagacaaagcacaccatatgtccactgttctgttctcatagaggaaattcaaatcccttttatctattagataatcaagggcactgtgatacagttttgagtaaaaagacattttttaaaagccttccagttttgtggattaaacctttttataaagatcatttataatactgttttaaaatgtgaggcaataagaattactttgtgttggatctgaggaggctttggtaaaacagtttcatctaaatgaaagtggtaatcctcttctaaaatagcaataactgaaaatgaaagtgttaattttaccttgtttgagttatcagggaacttagtaagtaatatcaaagcattttataaatgatatcaaagaagagtcaacattgatccagtcattttattttgtaatattgagggataattggttattaaactgaatagttcaggagactttacaaacctttgtttcaactttcttatctggaaataatatcatttataaagggacacttttatgtttttcccttttttatgttggttgatataacacaaagagatatttaggaaaatgcttattgatgaggtttattctatctgtttttaaagcaccgaggttgcattctagataaccttgtttattagcatggcatattttaatcattatttgagactgtcctgtgcctgattattttagctaaattcagggagattgcgtggggcaggaaagcatgcattgaaaaatttctaaccacggttatttaagcataatctgaaaacatctagcccaaaggtaagttgctattttcatcacagttgcctatgcccagggaataagatgtattctttataattgaattggtttttcccacgtctaactggaaacaaaacagaaggggcgtcataaatttgaataagcagaacatactgttctcaacatactgtaatcaaaaggaggaatttcagtgggtctctgtgtgtgtatgagagagagagtgtgtgtttgtgtgtttcaaggtcagaacaggtttttttgtttttgttttttgttctttgtttttttttttgagatggagtcttgctcttgtcgcccaggctggagtgcagtggcgcaatctcagctcactgcaacctccgcctcccaggttcaagcagttctcctgcctcagcctcctgagtagctgggatgacaggcacccgccaccacacccagctaatttttgtacttttagtagagacgaggtttcgccatgttggccaggctggtctcgaactcctgacctcaggtgatccacccgcctcggccttccaaagtgctgggattacaggcgtgagccaccgtgcctggccagaataggttttttctttcaacttgatcagtagaaaatggacatcaagtttgaacagataaatcatggacagccttattgtgattgaaatgcttgtaggttctgtgccaattttccaccactgtgtactttgttgctatttaaaactgtatcaactctaacggaagaataaattatttgtgattttaaaaaa

SEQ ID NO: 2300 - DNA, 16599 bp, Homo sapiens
ctgcttcacttcacggggcgaacatggcgcacagctgtcggtggcgcttccccgcccgacccgggaccaccgggggcggcggcggcggggggcgccggggcctagggggcgccccgcggcaacgcgtcccggccctgctgcttccccccgggcccccggtcggcggtggcggccccggggcgcccccctcccccccggctgtggcggccgcggcggcggcggcgggaagcagcggggctggggttccagggggagcggccgccgcctcagcagcctcctcgtcgtccgcctcgtcttcgtcttcgtcatcgtcctcagcctcttcagggccggccctgctccgggtgggcccgggcttcgacgcggcgctgcaggtctcggccgccatcggcaccaacctgcgccggttccgggccgtgtttggggagagcggcgggggaggcggcagcggagaggatgagcaattcttaggttttggctcagatgaagaagtcagagtgcgaagtcccacaaggtctccttcagttaaaactagtcctcgaaaacctcgtgggagacctagaagtggctctgaccgaaattcagctatcctctcagatccatctgtgttttcccctctaaataaatcagagaccaaatctggagataagatcaagaagaaagattctaaaagtatagaaaagaagagaggaagacctcccaccttccctggagtaaaaatcaaaataacacatggaaaggacatttcagagttaccaaagggaaacaaagaagatagcctgaaaaaaattaaaaggacaccttctgctacgtttcagcaagccacaaagattaaaaaattaagagcaggtaaactctctcctctcaagtctaagtttaagacagggaagcttcaaataggaaggaagggggtacaaattgtacgacggagaggaaggcctccatcaacagaaaggataaagaccccttcgggtctcctcattaattctgaactggaaaagccccagaaagtccggaaagacaaggaaggaacacctccacttacaaaagaagataagacagttgtcagacaaagccctcgaaggattaagccagttaggattattccttcttcaaaaaggacagatgcaaccattgctaagcaactcttacagagggcaaaaaagggggctcaaaagaaaattgaaaaagaagcagctcagctgcagggaagaaaggtgaagacacaggtcaaaaatattcgacagttcatcatgcctgttgtcagtgctatctcctcgcggatcattaagacccctcggcggtttatagaggatgaggattatgaccctccaattaaaattgcccgattagagtctacaccgaatagtagattcagtgccccgtcctgtggatcttctgaaaaatcaagtgcagcttctcagcactcctctcaaatgtcttcagactcctctcgatctagtagccccagtgttgatacctccacagactctcaggcttctgaggagattcaggtacttcctgaggagcggagcgatacccctgaagttcatcctccactgcccatttcccagtccccagaaaatgagagtaatgataggagaagcagaaggtattcagtgtcggagagaagttttggatctagaacgacgaaaaaattatcaactctacaaagtgccccccagcagcagacctcctcgtctccacctccacctctgctgactccaccgccaccactgcagccagcctccagtatctctgaccacacaccttggcttatgcctccaacaatccccttagcatcaccatttttgcctgcttccactgctcctatgcaagggaagcgaaaatctattttgcgagaaccgacatttaggtggacttctttaaagcattctaggtcagagccacaatacttttcctcagcaaagtatgccaaagaaggtcttattcgcaaaccaatatttgataatttccgaccccctccactaactcccgaggacgttggctttgcatctggtttttctgcatctggtaccgctgcttcagcccgattgttttcgccactccattctggaacaaggtttgatatgcacaaaaggagccctcttctgagagctccaagatttactccaagtgaggctcactctagaatatttgagtctgtaaccttgcctagtaatcgaacttctgctggaacatcttcttcaggagtatccaatagaaaaaggaaaagaaaagtgtttagtcctattcgatctgaaccaagatctccttctcactccatgaggacaagaagtggaaggcttagtagttctgagctctcacctctcacccccccgtcttctgtctcttcctcgttaagcatttctgttagtcctcttgccactagtgccttaaacccaacttttacttttccttctcattccctgactcagtctggggaatctgcagagaaaaatcagagaccaaggaagcagactagtgctccggcagagccattttcatcaagtagtcctactcctctcttcccttggtttaccccaggctctcagactgaaagagggagaaataaagacaaggcccccgaggagctgtccaaagatcgagatgctgacaagagcgtggagaaggacaagagtagagagagagaccgggagagagaaaaggagaataagcgggagtcaaggaaagagaaaaggaaaaagggatcagaaattcagagtagttctgctttgtatcctgtgggtagggtttccaaagagaaggttgttggtgaagatgttgccacttcatcttctgccaaaaaagcaacagggcggaagaagtcttcatcacatgattctgggactgatattacttctgtgactcttggggatacaacagctgtcaaaaccaaaatacttataaagaaagggagaggaaatctggaaaaaaccaacttggacctcggcccaactgccccatccctggagaaggagaaaaccctctgcctttccactccttcatctagcactgttaaacattccacttcctccataggctccatgttggctcaggcagacaagcttccaatgactgacaagagggttgccagcctcctaaaaaaggccaaagctcagctctgcaagattgagaagagtaagagtcttaaacaaaccgaccagcccaaagcacagggtcaagaaagtgactcatcagagacctctgtgcgaggaccccggattaaacatgtctgcagaagagcagctgttgcccttggccgaaaacgagctgtgtttcctgatgacatgcccaccctgagtgccttaccatgggaagaacgagaaaagattttgtcttccatggggaatgatgacaagtcatcaattgctggctcagaagatgctgaacctcttgctccacccatcaaaccaattaaacctgtcactagaaacaaggcaccccaggaacctccagtaaagaaaggacgtcgatcgaggcggtgtgggcagtgtcccggctgccaggtgcctgaggactgtggtgtttgtactaattgcttagataagcccaagtttggtggtcgcaatataaagaagcagtgctgcaagatgagaaaatgtcagaatctacaatggatgccttccaaagcctacctgcagaagcaagctaaagctgtgaaaaagaaagagaaaaagtctaagaccagtgaaaagaaagacagcaaagagagcagtgttgtgaagaacgtggtggactctagtcagaaacctaccccatcagcaagagaggatcctgccccaaagaaaagcagtagtgagcctcctccacgaaagcccgtcgaggaaaagagtgaagaagggaatgtctcggcccctgggcctgaatccaaacaggccaccactccagcttccaggaagtcaagcaagcaggtctcccagccagcactggtcatcccgcctcagccacctactacaggaccgccaagaaaagaagttcccaaaaccactcctagtgagcccaagaaaaagcagcctccaccaccagaatcaggtccagagcagagcaaacagaaaaaagtggctccccgcccaagtatccctgtaaaacaaaaaccaaaagaaaaggaaaaaccacctccggtcaataagcaggagaatgcaggcactttgaacatcctcagcactctctccaatggcaatagttctaagcaaaaaattccagcagatggagtccacaggatcagagtggactttaaggaggattgtgaagcagaaaatgtgtgggagatgggaggcttaggaatcttgacttctgttcctataacacccagggtggtttgctttctctgtgccagtagtgggcatgtagagtttgtgtattgccaagtctgttgtgagcccttccacaagttttgtttagaggagaacgagcgccctctggaggaccagctggaaaattggtgttgtcgtcgttgcaaattctgtcacgtttgtggaaggcaacatcaggctacaaagcagctgctggagtgtaataagtgccgaaacagctatcaccctgagtgcctgggaccaaactaccccaccaaacccacaaagaagaagaaagtctggatctgtaccaagtgtgttcgctgtaagagctgtggatccacaactccaggcaaagggtgggatgcacagtggtctcatgatttctcactgtgtcatgattgcgccaagctctttgctaaaggaaacttctgccctctctgtgacaaatgttatgatgatgatgactatgagagtaagatgatgcaatgtggaaagtgtgatcgctgggtccattccaaatgtgagaatctttcagatgagatgtatgagattctatctaatctgccagaaagtgtggcctacacttgtgtgaactgtactgagcggcaccctgcagagtggcgactggcccttgaaaaagagctgcagatttctctgaagcaagttctgacagctttgttgaattctcggactaccagccatttgctacgctaccggcaggctgccaagcctccagacttaaatcccgagacagaggagagtataccttcccgcagctcccccgaaggacctgatccaccagttcttactgaggtcagcaaacaggatgatcagcagcctttagatctagaaggagtcaagaggaagatggaccaagggaattacacatctgtgttggagttcagtgatgatattgtgaagatcattcaagcagccattaattcagatggaggacagccagaaattaaaaaagccaacagcatggtcaagtccttcttcattcggcaaatggaacgtgtttttccatggttcagtgtcaaaaagtccaggttttgggagccaaataaagtatcaagcaacagtgggatgttaccaaacgcagtgcttccaccttcacttgaccataattatgctcagtggcaggagcgagaggaaaacagccacactgagcagcctcctttaatgaagaaaatcattccagctcccaaacccaaaggtcctggagaaccagactcaccaactcctctgcatcctcctacaccaccaattttgagtactgataggagtcgagaagacagtccagagctgaacccacccccaggcatagaagacaatagacagtgtgcgttatgtttgacttatggtgatgacagtgctaatgatgctggtcgtttactatatattggccaaaatgagtggacacatgtaaattgtgctttgtggtcagcggaagtgtttgaagatgatgacggatcactaaagaatgtgcatatggctgtgatcaggggcaagcagctgagatgtgaattctgccaaaagccaggagccaccgtgggttgctgtctcacatcctgcaccagcaactatcacttcatgtgttcccgagccaagaactgtgtctttctggatgataaaaaagtatattgccaacgacatcgggatttgatcaaaggcgaagtggttcctgagaatggatttgaagttttcagaagagtgtttgtggactttgaaggaatcagcttgagaaggaagtttctcaatggcttggaaccagaaaatatccacatgatgattgggtctatgacaatcgactgcttaggaattctaaatgatctctccgactgtgaagataagctctttcctattggatatcagtgttccagggtatactggagcaccacagatgctcgcaagcgctgtgtatatacatgcaagatagtggagtgccgtcctccagtcgtagagccggatatcaacagcactgttgaacatgatgaaaacaggaccattgcccatagtccaacatcttttacagaaagttcatcaaaagagagtcaaaacacagctgaaattataagtcctccatcaccagaccgacctcctcattcacaaacctctggctcctgttattatcatgtcatctcaaaggtccccaggattcgaacacccagttattctccaacacagagatcccctggctgtcgaccgttgccttctgcaggaagtcctaccccaaccactcatgaaatagtcacagtaggtgatcctttactctcctctggacttcgaagcattggctccaggcgtcacagtacctcttccttatcaccccagcggtccaaactccggataatgtctccaatgagaactgggaatacttactctaggaataatgtttcctcagtctccaccaccgggaccgctactgatcttgaatcaagtgccaaagtagttgatcatgtcttagggccactgaattcaagtactagtttagggcaaaacacttccacctcttcaaatttgcaaaggacagtggttactgtaggcaataaaaacagtcacttggatggatcttcatcttcagaaatgaagcagtccagtgcttcagacttggtgtccaagagctcctctttaaagggagagaagaccaaagtgctgagttccaagagctcagagggatctgcacataatgtggcttaccctggaattcctaaactggccccacaggttcataacacaacatctagagaactgaatgttagtaaaatcggctcctttgctgaaccctcttcagtgtcgttttcttctaaagaggccctctccttcccacacctccatttgagagggcaaaggaatgatcgagaccaacacacagattctacccaatcagcaaactcctctccagatgaagatactgaagtcaaaaccttgaagctatctggaatgagcaacagatcatccattatcaacgaacatatgggatctagttccagagataggagacagaaagggaaaaaatcctgtaaagaaactttcaaagaaaagcattccagtaaatcttttttggaacctggtcaggtgacaactggtgaggaaggaaacttgaagccagagtttatggatgaggttttgactcctgagtatatgggccaacgaccatgtaacaatgtttcttctgataagattggtgataaaggcctttctatgccaggagtccccaaagctccacccatgcaagtagaaggatctgccaaggaattacaggcaccacggaaacgcacagtcaaagtgacactgacacctctaaaaatggaaaatgagagtcaatccaaaaatgccctgaaagaaagtagtcctgcttcccctttgcaaatagagtcaacatctcccacagaaccaatttcagcctctgaaaatccaggagatggtccagtggcccaaccaagccccaataatacctcatgccaggattctcaaagtaacaactatcagaatcttccagtacaggacagaaacctaatgcttccagatggccccaaacctcaggaggatggctcttttaaaaggaggtatccccgtcgcagtgcccgtgcacgttctaacatgttttttgggcttaccccactctatggagtaagatcctatggtgaagaagacattccattctacagcagctcaactgggaagaagcgaggcaagagatcagctgaaggacaggtggatggggccgatgacttaagcacttcagatgaagacgacttatactattacaacttcactagaacagtgatttcttcaggtggagaggaacgactggcatcccataatttatttcgggaggaggaacagtgtgatcttccaaaaatctcacagttggatggtgttgatgatgggacagagagtgatactagtgtcacagccacaacaaggaaaagcagccagattccaaaaagaaatggtaaagaaaatggaacagagaacttaaagattgatagacctgaagatgctggggagaaagaacatgtcactaagagttctgttggccacaaaaatgagccaaagatggataactgccattctgtaagcagagttaaaacacagggacaagattccttggaagctcagctcagctcattggagtcaagccgcagagtccacacaagtaccccctccgacaaaaatttactggacacctataatactgagctcctgaaatcagattcagacaataacaacagtgatgactgtgggaatatcctgccttcagacattatggactttgtactaaagaatactccatccatgcaggctttgggtgagagcccagagtcatcttcatcagaactcctgaatcttggtgaaggattgggtcttgacagtaatcgtgaaaaagacatgggtctttttgaagtattttctcagcagctgcctacaacagaacctgtggatagtagtgtctcttcctctatctcagcagaggaacagtttgagttgcctctagagctaccatctgatctgtctgtcttgaccacccggagtcccactgtccccagccagaatcccagtagactagctgttatctcagactcaggggagaagagagtaaccatcacagaaaaatctgtagcctcctctgaaagtgacccagcactgctgagcccaggagtagatccaactcctgaaggccacatgactcctgatcattttatccaaggacacatggatgcagaccacatctctagccctccttgtggttcagtagagcaaggtcatggcaacaatcaggatttaactaggaacagtagcacccctggccttcaggtacctgtttccccaactgttcccatccagaaccagaagtatgtgcccaattctactgatagtcctggcccgtctcagatttccaatgcagctgtccagaccactccaccccacctgaagccagccactgagaaactcatagttgttaaccagaacatgcagccactttatgttctccaaactcttccaaatggagtgacccaaaaaatccaattgacctcttctgttagttctacacccagtgtgatggagacaaatacttcagtattgggacccatgggaggtggtctcacccttaccacaggactaaatccaagcttgccaacttctcaatctttgttcccttctgctagcaaaggattgctacccatgtctcatcaccagcacttacattccttccctgcagctactcaaagtagtttcccaccaaacatcagcaatcctccttcaggcctgcttattggggttcagcctcctccggatccccaacttttggtttcagaatccagccagaggacagacctcagtaccacagtagccactccatcctctggactcaagaaaagacccatatctcgtctacagacccgaaagaataaaaaacttgctccctctagtaccccttcaaacattgccccttctgatgtggtttctaatatgacattgattaacttcacaccctcccagcttcctaatcatccaagtctgttagatttggggtcacttaatacttcatctcaccgaactgtccccaacatcataaaaagatctaaatctagcatcatgtattttgaaccggcacccctgttaccacagagtgtgggaggaactgctgccacagcggcaggcacatcaacaataagccaggatactagccacctcacatcagggtctgtgtctggcttggcatccagttcctctgtcttgaatgttgtatccatgcaaactaccacaacccctacaagtagtgcgtcagttccaggacacgtcaccttaaccaacccaaggttgcttggtaccccagatattggctcaataagcaatcttttaatcaaagctagccagcagagcctggggattcaggaccagcctgtggctttaccgccaagttcaggaatgtttccacaactggggacatcacagaccccctctactgctgcaataacagcggcatctagcatctgtgtgctcccctccactcagactacgggcataacagccgcttcaccttctggggaagcagacgaacactatcagcttcagcatgtgaaccagctccttgccagcaaaactgggattcattcttcccagcgtgatcttgattctgcttcagggccccaggtatccaactttacccagacggtagacgctcctaatagcatgggactggagcagaacaaggctttatcctcagctgtgcaagccagccccacctctcctgggggttctccatcctctccatcttctggacagcggtcagcaagcccttcagtgccgggtcccactaaacccaaaccaaaaaccaaacggtttcagctgcctctagacaaagggaatggcaagaagcacaaagtttcccatttgcggaccagttcttctgaagcacacattccagaccaagaaacgacatccctgacctcaggcacagggactccaggagcagaggctgagcagcaggatacagctagcgtggagcagtcctcccagaaggagtgtgggcaacctgcagggcaagtcgctgttcttccggaagttcaggtgacccaaaatccagcaaatgaacaagaaagtgcagaacctaaaacagtggaagaagaggaaagtaatttcagctccccactgatgctttggcttcagcaagaacaaaagcggaaggaaagcattactgagaaaaaacccaagaaaggacttgtttttgaaatttccagtgatgatggctttcagatctgtgcagaaagtattgaagatgcctggaagtcattgacagataaagtccaggaagctcgatcaaatgcccgcctaaagcagctctcatttgcaggtgttaacggtttgaggatgctggggattctccatgatgcagttgtgttcctcattgagcagctgtctggtgccaagcactgtcgaaattacaaattccgtttccacaagccagaggaggccaatgaaccccccttgaaccctcacggctcagccagggctgaagtccacctcaggaagtcagcatttgacatgtttaacttcctggcttctaaacatcgtcagcctcctgaatacaaccccaatgatgaagaagaggaggaggtacagctgaagtcagctcggagggcaactagcatggatctgccaatgcccatgcgcttccggcacttaaaaaagacttctaaggaggcagttggtgtctacaggtctcccatccatggccggggtcttttctgtaagagaaacattgatgcaggtgagatggtgattgagtatgccggcaacgtcatccgctccatccagactgacaagcgggaaaagtattacgacagcaagggcattggttgctatatgttccgaattgatgactcagaggtagtggatgccaccatgcatggaaatgctgcacgcttcatcaatcactcgtgtgagcctaactgctattctcgggtcatcaatattgatgggcagaagcacattgtcatctttgccatgcgtaagatctaccgaggagaggaactcacttacgactataagttccccattgaggatgccagcaacaagctgccctgcaactgtggcgccaagaaatgccggaagttcctaaactaaagctgctcttctcccccagtgttggagtgcaaggaggcggggccatccaaagcaacgctgaaggccttttccagcagctgggagctcccggattgcgtggcacagctgaggggcctctgtgatggctgagctctcttatgtcctatactcacatcagacatgtgatcatagtcccagagacagagttgaggtctcgaagaaaagatccatgatcggctttctcctggggcccctccaattgtttactgttagaaagtgggaatggggtccctagcagacttgcctggaaggagcctattatagagggttggttatgttgggagattgggcctgaatttctccacagaaataagttgccatcctcaggttggccctttcccaagcactgtaagtgagtgggtcaggcaaagccccaaatggagggttggttagattcctgacagtttgccagccaggccccacctacagcgtctgtcgaacaaacagaggtctggtggttttccctactatcctcccactcgagagttcacttctggttgggagacaggattcctagcacctccggtgtcaaaaggctgtcatggggttgtgccaattaattaccaaacattgagcctgcaggctttgagtgggagtgttgcccccaggagccttatctcagccaattacctttcttgacagtaggagcggcttccctctcccattccctcttcactcccttttcttcctttcccctgtcttcatgccactgctttcccatgcttctttcgggttgtaggggagactgactgcctgctcaaggacactccctgctgggcataggatgtgcctgcaaaaagttccctgagcctgtaagcactccaggtggggaagtggacaggagccattggtcataaccagacagaatttggaaacattttcataaagctccatggagagttttaaagaaacatatgtagcatgattttgtaggagaggaaaaagattatttaaataggatttaaatcatgcaacaacgagagtatcacagccaggatgacccttgggtcccattcctaagacatggttactttattttccccttgttaagacataggaagacttaatttttaaacggtcagtgtccagttgaaggcagaacactaatcagatttcaaggcccacaacttggggactagaccaccttatgttgagggaactctgccacctgcgtgcaacccacagctaaagtaaattcaatgacactactgccctgattactccttaggatgtggtcaaaacagcatcaaatgtttcttctcttcctttccccaagacagagtcctgaacctgttaaattaagtcattggattttactctgttctgtttacagtttactatttaaggttttataaatgtaaatatattttgtatatttttctatgagaagcacttcatagggagaagcacttatgacaaggctattttttaaaccgcggtattatcctaatttaaaagaagatcggtttttaataattttttattttcataggatgaagttagagaaaatattcagctgtacacacaaagtctggtttttcctgcccaacttccccctggaaggtgtactttttgttgtttaatgtgtagcttgtttgtgccctgttgacataaatgtttcctgggtttgctctttgacaataaatggagaaggaaggtcacccaactccattgggccactcccctccttcccctattgaagctcctcaaaaggctacagtaatatcttgatacaacagattctcttctttcccgcctctctcctttccggcgcaacttccagagtggtgggagacggcaatctttacatttccctcatctttcttacttcagagttagcaaacaacaagttgaatggcaacttgacatttttgcatcaccatctgcctcataggccactctttcctttccctctgcccaccaagtcctcatatctgcagagaacccattgatcaccttgtgccctcttttggggcagcctgttgaaactgaagcacagtctgaccactcacgataaagcagatttttctctgcctctgccacaaggtttcagagtagtgtagtccaagtagagggtggggcacccttttctcgccgcaagaagcccattcctatggaagtctagcaaagcaatacgactcagcccagcactctctgccccaggactcatggctctgctgtgccttccatcctgggctcccttctctcctgtgaccttaagaactttgtctggtggctttgctggaacattgtcactgttttcactgtcatgcagggagcccagcactgtggccaggatggcagagacttccttgtcatcatggagaagtgccagcaggggactgggaaaagcactctacccagacctcacctcccttcctccttttgcccatgaacaagatgcagtggccctaggggttccactagtgtctgctttcctttattattgcactgtgtgaggtttttttgtaaatccttgtattcctattttttttaaagaaaaaaaaaaaaccttaagctgcatttgttactgaaatgattaatgcactgatgggtcctgaattcaccttgagaaagacccaaaggccagtcagggggtggggggaactcagctaaatagacctagttactgccctgctaggccatgctgtactgtgagcccctcctcactctctaccaaccctaaaccctgaggacaggggaggaacccacagcttccttctcctgccagctgcagatggtttgccttgcctttccaccccctaattgtcaaccacaaaaatgagaaattcctcttctagctcagccttgagtccattgccaaattttcagcacacctgccagcaacttgggggaataagcgaaggtttccctacaagagggaaagaaggcaaaaacggcacagctatctccaaacacatctgagttcatttcaaaagtgaccaagggaatctccgcacaaaagtgcagattgaggaattgtgatgggtcattcccaagaatcccccaaggggcatcccaaatccctgaggagtaacagctgcaaacctggtcagttctcagtgagagccagctcacttatagctttgctgctagaacctgttgtggctgcatttcctggtggccagtgacaactgtgtaaccagaatagctgcatggcgctgaccctttggccggaacttggtctcttggctccctccttggccacccaccacctctcgcacagcccctctgtttttacaccaataacaagaattaagggggaagccctggcagctatacgttttcaaccagactcctttgccgggacccagcccgccaccctgctcgcctccgtcaaacccccggccaatgcagtgagcaccatgtagctcccttgatttaaaaaaaataaaaaataaaaaaaaaaggaaaaaaaaatacaacacacacacaaaaataaaaaaaatattctaatgaatgtatctttctaaaggactgacgttcaatcaaatatctgaaaatactaaaggtcaaaaccttgtcagatgttaacttctaagttcggtttgggattttttttttttaatagaaatcaagttgtttttgtttttaaggaaaagcgggtcattgcaaagggctgggtgtaattttatgtttcatttccttcattttaaagcaatacaaggttatggagcagatggttttgtgccgaatcatgaatactagtcaagtcacacactctggaaacttgcaactttttgtttgttttggttttcaaataaatataaatatgatatatataggaactaatatagtaatgcaccatgtaacaaagcctagttcagtccatggcttttaattctcttaacactatagataaggattgtgttacagttgctagtagcggcaggaagatgtcaggctcactttcctctgattcccgaaatggggggaacctctaaccataaaggaatggtagaacagtccattcctcggatcagagaaaaatgcagacatggtgtcacctggatttttttctgcccatgaatgttgccagtcagtacctgtcctccttgtttctctatttttggttatgaatgttggggttaccacctgcatttaggggaaaattgtgttctgtgctttcctggtatcttgttccgaggtactctagttctgtctttcaaccaagaaaatagaattgtggtgtttcttttattgaacttttaacagtctctttagtaaatacaggtagttgaataattgtttcaagagctcaacagatgacaagcttcttttctagaaataagacattttttgacaactttatcatgtataacagatctgttttttttccttgtgttcttccaagcttctggttagagaaaaagagaaaaaaaaaaaaggaaaatgtgtctaaagtccatcagtgttaactccctgtgacagggatgaaggaaaatactttaatagttcaaaaaataataatgctgaaagctctctacgaaagactgaatgtaaaagtaaaaagtgtacatagttgtaaaaaaaaggagtttttaaacatgtttattttctatgcacttttttttatttaagtgatagtttaattaataaacatgtcaagtttaaaaaaaaaaaaaaa

SEQ ID NO: 2301 - DNA, 4891 bp, Homo sapiens; identical to SEQ ID NO: 1837

SEQ ID NO: 2302 - DNA, 5794 bp, Homo sapiens; identical to SEQ ID NO: 533

SEQ ID NO: 2303 - DNA, 3224 bp, Homo sapiens; identical to SEQ ID NO: 2255

SEQ ID NO: 2304 - DNA, 2979 bp, Homo sapiens
atggccgcgggagccgggacggcgggccccgcttccggcccgggcgtcgtgcgtgacccagcggcgtcacagccgaggaagcggcccggccgggagggcggggagggcgcgcggcgatcggacacgatggcgggaggaggcgggagtagcgacggcagcgggcgggcagctggcaggcgggcgtcccgcagtagcgggcgggcccggcgggggcgccacgagccggggctggggggcccggcggagcgcggcgcgggggaggcacggctggaagaggcagtcaatcgctgggtgctcaagttctacttccacgaggcgctgcgggcctttcggggtagccggtacggggacttcagacagatccgggacatcatgcaggctttgcttgtcaggcccttggggaaggagcacaccgtgtcccgattgctgcgggttatgcagtgtctgtcgcggattgaagaaggggaaaatttagactgttcctttgatatggaggctgagctcacaccactggaatcagctatcaatgtgctggagatgattaaaacggaatttacactgacagaagcagtggtcgaatccagtagaaaactggtcaaggaagctgctgtcattatttgtatcaaaaacaaagaatttgaaaaggcttcaaaaattttgaaaaaacatatgtccaaggaccccacaactcagaagctgagaaatgatctcctgaatattattcgagaaaagaacttggcccatcctgttatccagaacttttcatatgagaccttccagcagaagatgctgcgcttcctggagagccacctggatgacgccgagccctacctcctcacgatggccaaaaaggctttgaaatctgagtccgctgcctcaagtacagggaaggaagataaacagccagcaccagggcctgtggaaaagccacccagagaacccgcaaggcagctacggaatcctccaaccaccattggaatgatgactctgaaagcagctttcaagactctgtctggtgcacaggattctgaggcagcctttgcaaaactggaccagaaggatctggttcttcctactcaagctctcccagcatcaccagccctcaaaaacaagagacccagaaaagatgaaaacgaaagttcagccccggctgacggtgagggtggctcggaactgcagcccaagaacaagcgcatgacaataagcagattggtcttggaggaggacagccagagtactgagcccagcgcaggcctcaactcctcccaggaggccgcttcagcgccaccatccaagcccaccgttctcaaccaacccctccctggagagaagaatcccaaagtacccaaaggcaagtggaacagctctaatggggttgaagaaaaggagacttgggtggaagaggatgaactgtttcaagttcaggcagcaccagatgaagacagtacaaccaatataacaaaaaagcagaagtggactgtagaagaaagcgagtgggtcaaggctggagtgcagaaatatggggaaggaaactgggctgccatttctaaaaattacccatttgttaaccgaacagctgtgatgattaaggatcgctggcggaccatgaaaagacttggcatgaactgaaacaggctttcatttccacagaattcacaggagcatggttcctaataatagcccctgatagtctgctctttctttctttttcttttttttttttttttgagacagagtctcgctctgtcacccaggctggagtgcagtggcgtgatctcggctcactgcgacctccgtctcccgggctcacgccattctcctgcctcagcctcccgagtagctgggactacaggcgcccgccatcacgcccggctaatgttttgtatttttagtagagacggggtttcaccgtgttagccaggatggtctcgatctcctgacctcgtgatccacccaactcggcctcccaaagtgctgggattacaggcatgagccaccgcgcctggcatctgctgtttctttcagaagctgggctgggatgagaattttgggcaacctccttcgacgtgggggaggtcccatttccacttcatcactgttggagatcatggagctaagaagcagagccaagtccacccatgtccttggcagagatgacaggcacacagcttgtgcagtgccagaatatcattagcgtttcccttctttagtggtttgcttaaatttaaatccctggtaatctgtagaaccttctcctaggaaatggtgaagtctattaggagccacttgtgactccatgacctgttaaaaccagcaatgtgagtattatttggagtaaatttgttccacgtcaagttctggccttctgatgcaaatgcaaaggaacttagtctgttatgaacccaggttgatgacagaccagtccttgtggaataagattccctttaaaaactctttagccagtcgtgacatcaaccctagacctgtctgccttggcatttgctgtcaacatctgctgggctatgtaggcaggttaatcctccacttctcatgtggttgaaccagtgtgttttttggtaaaatggtgattgtagataagattagttccctgatcccctgccccctgtcccctgcctcttttcccaattcccttccttatgctggacttttaaagcttaaaaaaaatccgattgaatataaatgcctaatttcattctttgtgaaatggttgcttcctcctgattccctaattgtgctgtgttcgtgtcttgcactggaattcaacattcccttctccttttgtactgtgttgtgcttgctgtctctcccggacacccttaaagactgtctttttagcaaaaaatttcagtaaagtgttttctgtaatctttttttaaaaggtgagaactaattattgtccatacttgtagcattcttcattaaagtcttgcttctctcaactgtaaaaaaaaaaaaaaa

SEQ ID NO: 2305 - DNA, 2210 bp, Homo sapiens; identical to SEQ ID NO: 2140

SEQ ID NO: 2306 - DNA, 468 bp, Homo sapiens
atggaaatgagggtccccgctcagctcctggggctcctgctgctctggctccgaggtgccagatgtgacatccaggtgacccagtctccatcttccctgtctgcgtctgtaggagacagagtcaccatcacctgccgggcaagtcagggcattagcaatgggttatcctggtatcagcagaaaccagggcaagcccctacgctcctgatctatgctgcatccagtttgcagtcgggggtcccatctcggttcagtggcagtggatctgggacagatttcactctcaccatcagcagcctgcagcctgaagatgttgcaacttattactgtctacaggattatactaccccattcacagtgttacaagccataacaaaaaccccccagagaagcagatgtcggcacagacagggcaaaccctctcctgattgcattaagaacagagatgattacacctacgaagtctga

SEQ ID NO: 2307 - DNA, 3317 bp, Homo sapiens
cgaacaggggcggctgcctcactccctacctgagccagccgagggggccaaggactttagagctgtttcctccggcataagagagacacttgctttccagggcagcaccctttatcggagaaggctctacagggaaggggtctttgcagcctggatggccatcccacattcctttaacggaggtctctaggcctcagagagaacccagagttagaaaggaggccagacggtccttgctgtccccctggggagagaggaagttgccgcctgctgccaggcccaggaggagctgggcctgcaatagtgggggacctggcccctgaggcagtggcggccatgtcacggccaggccacggtgggctgatgcctgtgaatggtctgggcttcccaccgcagaacgtggcccgggtggtggtgtgggagtggctgaatgagcacagccgctggcggccctacacggccaccgtgtgccaccacattgagaacgtgctgaaggaggacgctcgcggttccgtggtcctggggcaggtggacgcccagcttgtgccctacatcatcgacctgcagtccatgcaccagtttcgccaggacacaggcaccatgcggcccgtgcggcgcaacttctacgacccgtcgtcggcgccgggcaagggcatcgtgtgggagtgggagaacgacggcggcgcatggacggcctacgatatggacatctgcatcaccatccagaacgcctacgagaagcagcacccgtggctcgacctctcatcgctaggcttctgctacctcatctacttcaacagcatgtcgcagatgaaccgccagacgcgccggcgccgccgcctgcgccgccgcctggacctcgcctacccgctcaccgtgggctccatccctaagtcgcagtcgtggcccgtgggcgccagctcgggccagccctgctcctgccagcagtgcctgctggtcaacagcacgcgcgccgcctccaacgccatcctggcctcgcagcgccgcaaggcgccccccgcgcccccgctgccgccgccgccgccacctggagggcctccaggcgcgcttgccgtgcgccccagcgccaccttcacaggcgccgcgctctgggcagcgcccgccgccggccccgccgagcccgcgccgcctcccggggcgcccccacggagcccgggcgcccccggcggagcgcgcaccccggggcagaacaacctcaaccggcccgggccccagcgcaccaccagcgtgagcgcgcgcgcctccatcccgccgggggtccccgcactcccggtgaagaacttgaatggtactgggccggtccatccggccctggcagggatgaccgggatactgctgtgcgcggccgggctgcccgtgtgcctgacgcgggcccccaagcccatcctgcacccgccgcccgtgagcaagagcgacgtgaagcccgtgcctggcgtgcccggggtgtgccgcaagaccaagaagaagcaccttaaaaagagtaagaatcccgaggatgtggttcgaagatacatgcagaaggtgaaaaacccacctgatgaggactgcaccatctgcatggagcgactggtcacagcatcaggctacgagggcgtgcttcggcacaagggcgtgcggcctgagctcgtgggccgcctgggccgctgtggccacatgtaccacctgctgtgcctcgtggccatgtactccaatggcaacaaggatggcagcctgcagtgccccacctgcaaggccatctacggggagaagacgggtacgcagccgcctgggaagatggagttccacctcatcccccactcgctgcccggcttccctgatacccagaccatccgcatcgtctatgacatccccacaggcatccagggccctgagcaccccaaccccgggaagaagttcaccgcaagaggattccctcgccactgctatctacccaacaacgagaaaggccggaaggtgctgcggctgctcatcacggcctgggagagaagactcatcttcactatcggcacgtccaacaccacgggcgagtcggacaccgtggtgtggaacgagatccaccacaagaccgagtttggatccaacctcacgggccacggctacccggacgctagctacctagacaacgtgctggctgagctcacagcccagggcgtatccgaggctgcagccaaggcttgaggcccaaggctgcccaccttccctcctgctttgcccctggtccggcaaatgcctccttcgccaggtgtgtcctggtagcccaggttcagggctggggaggagcctgcggaaggggccgcagccattcaggggacctgcctggtggcagctgggatgaagagagatggcatgtcaggctggccccgaatcatagctccctgagagggccaagcagagagtactggaaacctccctaccaaaaagacagagacccgccccctcacacacaaacacacatgtcctgttgaactcatgcacgcacacccacgtgcctgtacttgcccccaggctggaagagaagagacagaaagaccccatgacccccccatgtggatccccatctgtgtctcagttgcatctgtacagccttgtctgcaaactggaggatgcggggcaagcccttaggggcctgccagggctcggggggcaaagagggactcgggaaactcagtgtaccccagatgcctcacccattccgtgtcatcacccatgtctgccacccactgattgggcaattgtgggcccatggggtggaagcccccagatgactgagcagttctacaaaagaatggccagcacgagcggggactagagggtcctgattttgtgtctgtgcctcttcatctctctggactctgatctccttctcccttcccatctccaggccttctgtctgtcccagataaaggcgctgttctcccatcctccctaccccatcctctccaccaaatcgctcccaattttgagagccaaaggctggcgcttctgacttcaggagcgaaaggaggaggcctagtttgggccgatgtattttaaagcagagtggacagcagagagtcaatttccctttcgttgggagtgggcagtggggtggctaattgtcttcggccaaccaggggcctgttgcccaggcaactcaccagctccgcctctgctgattggctgccacggtgggagtcagccaagatttaaagggatgccagcgattgctcttttcaaaacctaccagtcccactgtgggtggagaaataaatggtctttctcctcctcaaaaaaaaaaaaaaaaaaaaaaaaaaaaa

SEQ ID NO: 2308 - DNA, 3927 bp, Homo sapiens
agatgtcgctcccggaagtgttgggcgcagggcgtggctgcggctgcggctgccacgttggaacggaacgtggaggtggccctggccggggaggaggggcggcggcgaatgctgggagagtccgacgagcgctgcactaacgcaggatccggctgccgaaggtcctcgccagcaggatgaagttaaaggaagtagatcgtacagccatgcaggcatggagccctgcccagaatcaccccatttacctagcaacaggaacatctgctcagcaattggatgcaacatttagtacgaatgcttcccttgagatatttgaattagacctctctgatccatccttggatatgaaatcttgtgccacattctcctcttctcacaggtaccacaagttgatttgggggccttataaaatggattccaaaggagatgtctctggagttctgattgcaggtggtgaaaatggaaatattattctctatgatccttctaaaattatagctggagacaaggaagttgtgattgcccagaatgacaagcatactggcccagtgagagccttggatgtgaacattttccagactaatctggtagcttctggtgctaatgaatctgaaatctacatatgggatctaaataattttgcaaccccaatgacaccaggagccaaaacacagccgccagaagatatcagctgcattgcatggaacagacaagttcagcatattttagcatcagccagtcccagtggccgggccactgtatgggatcttagaaaaaatgagccaatcatcaaagtcagtgaccatagtaacagaatgcattgttctgggttggcatggcatcctgatgttgctactcagatggtccttgcctccgaggatgaccggttaccagtgatccagatgtgggatcttcgatttgcttcctctccacttcgtgtcctggaaaaccatgccagggggattttggcaattgcttggagcatggcagatcctgaattgttactgagctgtggaaaagatgctaagattctctgctccaatccaaacacaggagaggtgttatatgaacttcccaccaacacacagtggtgcttcgatattcagtggtgtccccgaaatcctgctgtcttatcagctgcttcgtttgatgggcgtatcagtgtttattctatcatgggaggaagcacagatggtttaagacagaaacaagttgacaagctttcatcatcttttgggaatcttgatccctttggcacaggacagccccttcctccgttacaaattccacagcagactgctcagcatagtatagtgctgcctctgaagaagccgcccaagtggattcgaaggcctgttggtgcttctttttcatttggaggcaaactggttacgtttgagaatgtcagaatgccttctcatcagggagctgagcagcagcagcagcagcaccatgtgttcattagtcaggttgtaacagaaaaggagttcctcagccgatcagaccaacttcagcaggctgtgcagtcacaaggatttatcaattattgccaaaaaaaaattgatgcttctcagactgaatttgagaaaaatgtgtggtcctttttgaaggtaaactttgaggatgattctcgtggaaaataccttgaacttctaggatacagaaaagaagatctaggaaagaagattgctttggccttgaacaaagtggatggagccaatgtggctcttaaagactctgaccaagtagcacagagtgatggggaggagagccctgctgctgaagagcagctcttgggagagcacattaaagaggaaaaagaagaatctgaatttctaccctcatctggaggaacatttaatatctctgtcagtggggacattgatggtttaattactcaggctttgctgacgggcaattttgagagtgctgttgacctttgtttacatgataaccgcatggccgatgccattatattggccatagcaggtggacaagaactcttggctcgaacccagaaaaaatacttcgcaaaatcccaaagcaaaattaccaggctcatcactgcagtggtgatgaagaactggaaagagattgttgagtcttgtgatcttaaaaattggagagaggctttagctgcagtattgacttatgcaaagccggatgaattttcagccctttgtgatcttttgggaaccaggcttgaaaatgaaggagatagcctcctgcagactcaagcatgtctctgctatatttgtgcagggaatgtagagaaattagttgcatgttggactaaagctcaagatggaagccaccctttgtcacttcaggatctgattgagaaagttgtcatcctgcgaaaagctgtgcaactcactcaagccatggacactagtactgtaggagttctcttggctgcgaagatgagtcagtatgccaatttgttggcagctcagggcagtattgctgcagccttggcttttcttcctgacaacaccaaccagccaaatatcatgcagcttcgtgacagactttgtagagcacaaggagagcctgtagcaggacatgaatcacctaaaattccgtacgagaaacagcagctccccaagggcaggcctggaccagttgctggccaccaccagatgccaagagttcaaactcaacaatattatccccatggagaaaatcctccacctccgggtttcataatgcatggaaatgttaatccaaatgctgctggtcagcttcccacatctccaggtcatatgcacacccaggtaccaccttatccacagccacagcgtcctcagaatggttggaatgaccctccagctttgaacagagtacccaaaaagaagaagatgcctgaaaacttcatgcctcctgttcccatcacatcaccaatcatgaacccgttgggtgacccccagtcacaaatgctgcagcaacagccttcagctccagtaccactgtcaagccagtcttcattcccacagccacatcttccaggtggccagcccttccatggcgtacagcaacctcttggtcaaacaggcatgccaccatctttttcaaagcccaatattgaaggtgccccaggggctcctattggaaataccttccagcatgtgcagtctttgccaacaaaaaaaattaccaagaaacctattccagatgagcacctcattctaaagaccacatttgaggatcttattcagcgctgcctttcttcagcaacagaccctcaaaccaagaggaagctagatgatgccagcaaacgtttggagtttctgtatgataaacttagggaacagacactttcaccaacaatcaccagtggtttacacaacattgcaaggagcattgaaactcgaaactactcagaaggattgaccatgcatacccacatagttagcaccagcaacttcagtgagacctctgctttcatgccagttctcaaagttgttctcacccaggccaataagctgggtgtctaaaaggacagcttctcttccactcaatattgccatttttccaaagaaacatgttaaaaaaaaaaattataagacatggactagtcctcattagcatgtttgcatagcaaccagtcaagagcatttacactatttctgctgatatactcaccttagaactgctcagaaccctggtgctttatttttgttttaatcttttgttgccagtgatgattttcctattctgcaaatagtgtatttcctggattacacatagtatggtttcctgaagtattctgataaatgtgttttttaaaacctcaatatactttttagaaaaggagcatctggttatgcataaagcagagctaaaactaaatttctttcatgtcctccctacttcctcagtgtcaatcagattaaagtgtgtaatcctaaaaaaaaaaaaaaaaaa

SEQ ID NO: 2309 - DNA, 2544 bp, Homo sapiens
gattggctggggtgcttcgctcagccaatccggacgcgcccgggcgtcgcggccccgcctcctccccggcgctctgggcccgtagcgctccgcgggaaggaggctggatgcccggcagcagtggggcggggatggaggcggccgtggcgccggggagggatgcgccggcacccgcggcgagtcagcccagcggctgcgggaaacacaactcgccggagaggaaagtttatatggactataatgcaacgactcccctggagccagaagttatccaggccatgaccaaggccatgtgggaagcctggggaaatcccagcagcccgtattcagcaggaagaaaggccaaggatattataaatgcagctcgggaaagcctcgcgaagatgataggggggaaacctcaagatataatcttcacttccgggggcactgagtcaaataatttagtaatccattctgtggtgaaacatttccacgcaaaccagacctcaaagggacacacaggtgggcaccacagcccagtgaagggggccaagccccatttcattacttcctcggtggaacacgactccatccggctgcccctggagcacctggtggaagaacaagtggcagcggtcacctttgtcccggtgtccaaggtgagcgggcaggcagaggtggacgacatcctcgcggcagtccgcccgaccacacgcctcgtgaccatcatgctggccaacaatgagactggcattgtcatgcctgtccctgaaatcagtcagcgcattaaagccctgaaccaggaacgggtggcagctgggctacctcccatcctcgtgcacacggatgctgcacaggccttggggaagcagcgcgtggatgtggaggacctgggcgtggacttccttacaatcgtggggcacaagttttatggtcccaggattggcgcactttatatacgaggacttggtgaatttacccctctctaccctatgctatttggaggtggacaagaacggaatttcaggccagggacagagaacaccccaatgattgctggccttgggaaggccgcggagctggtgacccagaactgcgaggcttatgaggcccacatgagggacgtccgcgactacctggaagagaggctggaagctgaattcggtcagaagagaatccatctgaatagccagtttccaggcacccagcggcttcccaatacctgtaacttttccatccggggaccccggcttcaaggccacgtggtgcttgcgcagtgccgagtgctgatggccagtgtgggggccgcgtgccactcggaccacggggaccagccgtccccagtgctgctgagctacggtgtccccttcgacgtggccaggaacgcgctccggctcagcgtgggccgcagcaccaccagggccgaggtggacctcgtcgtgcaggacctgaagcaggccgtggcgcagctggaggaccaggcctagcactggggccgccttccccaccccgcttctgggaagcccgtggcagggcacagggttgtccctccagttccctcctgagggctgtgccaggatgactgtctcatgccccctctgcattttgtcctggagtgccagcgagtgtgcacccccagtttccttccctggacccctgcagagctcacagggcccaggacaccaacgccgcataggactgcccacatgggaccgcccacataggaccgcccacataggaccgcccacatgggaccgcccacatgggaccgcccacatgggaccgcccacatagaaccgtcctccagtggtgaagcggaaacacttagctttatccaccctccccactgggaactgggcacgcctgttgtgagtgccctttcctggaaggtgtttttatctggaagatagaatccaagtatttataactcattgtcagccaaatgctatcatgaacgtaggaaacttgatttttttgttttgatcatggcctctacatgcacctttccagagtggtctcttctcaggccctttttagtccctttccaaagctgcccccaccaccctgctcctctggcctcagtgcacagtggcccccagcctcggccaggcctgctctgctcagcgcccaccgcccaccacccctcctgcttccccgagcctgaccctgttccgcccactggcaatcagggctgcgcacttccctgtccacggtccccaggccttcctgtcttgtcccttttgatcattattaactcagggtttcagctccaacctcgctgagttggtgcagctccaggtcattcctggggtgggaatcggatcatccctgactcagcttttaccttaattttatttgcagaggattcttttctcaaaatgctctggcatttggacacacatcacatgtcgatatttgcataggagtcattttcagtggaataacatttttaatgtgtggttttacggttcaaggaactacttgatgattttgaggaaacacttgccagaaactaaattaacgaataaaagatttcagtgcccgaaaaaaaaaaaaaaaaaa

SEQ ID NO: 2310 - DNA, 1700 bp, Homo sapiens
cctagtcccagcccagggggccgctctcgccggcgtcgagggcgtggcggcgaggctgctgctgcaggcggctcccggctctgccttcggccccgcccgccgcccaccaggctcccagaggccccgcagctcgcgccgtccggctccccgcagccccgtcgggcagcccgggcccgtccgctgccctcccggctcccgtcctgcggcggcggggcgtgcaggtgaggccccacggcgcccggcctctccagcagtgggtgcctgatagacatcctaggactatacagaaggaaaaggcccactttgggggataatgctgagggacactatgaaatcttggaatgatagccagtcagatctgtgtagcactgaccaagaagaggaagaagagatgatttttggtgaaaatgaagatgatttggatgagatgatggatttaagtgatctgcctacctcactttttgcttgcagcgtccatgaagcagtgtttgaggcacgagagcagaaggaaagatttgaagcactcttcaccatctatgatgaccaggttacttttcagctgtttaaaagctttagaagagtcagaataaatttcagcaaacctgaagcggcagcaagagcgcgaatagaactccacgaaacagacttcaatgggcagaagctaaagctatattttgcacaggtgcagatgtccggcgaagtgcgggacaagtcctatctcctgccgccccagcctgtcaagcagttcctcatctcccctccagcctctcccccggtggggtggaagcagagcgaagatgcgatgcctgttataaattatgatttactctgtgctgtttccaaattgggaccaggagagaaatatgaacttcacgcgggaacagagtcgacacccagcgtggtggttcatgtctgtgaaagtgaaactgaagaggaagaagagacaaaaaaccccaaacagaaaattgcccagacgaggcgccccgaccctccgaccgcagcgttgaatgagccccagacctttgattgcgcgctgtgaggcccttggttgtggtgcgaggcggctgccctggtgggctctggccatggcgctctgtgcctgcggccgatgcgttgctgcgaacagcataggtgagactctgccgagtgaggtataggtcttctcaccacgcctgtactgcagacacggtcgtgtagagtagcagctgatttgacctgtcccagattttaagtgatattccaaaagggactttacattaaaggagaagcccccaagatgtggccacccttaaccatttttaaatagtaacaaattaggaaaacagctcccctcccctccagccatgtaagtcctcctgattctgtatcacatgagacaccaaaaactggaaatgtagtcacacccagtacagtaccatttttatgaatttaaaaatagtcttataattttaattgtttgtgggtatttttctactggtataaatagcttctaattaataaatcgatcaaaggttgttactcagtatacatgaaattttttgcaggaaaagaaaccagaaatacagaataattcatagaaatcatggttctcaagtatttgttcaattagctttggggaagaaatgccaaatccactttgaggatgagtcttacgacacagatccacccacatgttgctcttatctggaatttgggacaaa

SEQ ID NO: 2311 - DNA, 4090 bp, Homo sapiens; identical to SEQ ID NO: 2182

SEQ ID NO: 2312 - DNA, 439 bp, Homo sapiens
ggcttgaggttatttattactatttttgagaaaggaagagatgaaatatgagggggttaagtgtatttaatgtaaactaaaatgtttctgaagtgtgatagtgattatgtagtagaacaacttaagatccttgaaatccagtgtgaacaggttaaagagctctaggatggttaaaagtaaggtcacaataatagaaacaaaggttatgttcttgagacattaatttaggttgaatgatatagaattgtcaccttttaagataaaaaacagttgaatactggcaatttcatatggtccacttgatagacgttcaggagggaagaaatgcagaagtagggagtgtgaaggaaagggcataggtcttcaggtgtggtaccgtcaaccagggccatcactttttaatactgaatggctaggctcttgcagatgtagatcaaac

SEQ ID NO: 2313 - DNA, 1405 bp, Homo sapiens
gtcctcccgccccgccgcttggtggcggccgcatgctgcccggatataaagggtcggccccacatcccagggaccagcgagcggccttgagaggctctggctcttgcttcttaggcggcccgaggacgccatggccgagtgcccgacactcggggaggcagtcaccgaccacccggaccgcctgtgggcctgggagaagttcgtgtatttggacgagaagcagcacgcctggctgcccttaaccatcgagataaaggataggttacagttacgggtgctcttgcgtcgggaagacgtcgtcctggggaggcctatgacccccacccagataggcccaagcctgctgcctatcatgtggcagctctaccctgatggacgataccgatcctcagactccagtttctggcgcttagtgtaccacatcaagattgacggcgtggaggacatgcttctcgagctgctgccagatgactgatgtcttggcagcacctgtctcctttcaccccagggcctgagcctggccagcctacaatggggatgttgtgtttctgttcaccttcgtttactatgcctgtgtcttctccaccacgctggggtctgggaggaatggacagacagaggatgagctctacccagggcctgcaggacctgcctgtagcccactctgctcgccttagcactaccactcctgccaaggaggattccatttggcagagcttcttccaggtgcccagctatacctgtgcctcggcttttctcagctggatgatggtcttcagcctctttctgtcccttctgtccctcacagcactagtatttcatgttgcacacccactcagctccgtgaacttgtgagaacacagccgattcacctgagcaggacctctgaaaccctggaccagtggtctcacatggtgctacgcctgcatgtaaacacgcctgcaaacgctgcctgccggtaaacacgcctgcaaacgctgcctgcccgtaaacacgcctgcaaacgctgcctgcccacacaggttcacgtgcagctcaaggaaaggcctgaaaggagcccttatctgtgctcaggactcagaagcctctgggtcagtggtccacatcccgggacgcagcaggaggccaggccggcgagccctgtggatgagccctcagaacccttggcttgcccacgtggaaaagggatagaggttgggtttccccccttttatagatggtcacgcacctgggtgttacaaagttgtatgtggcatgaatactttttgtaatgattgattaaatgcaagatagtttatctaacttcgtgcggaatcagcttctatccttgacttagattctggtggagagaagtgagaataggcagcccccaaataaaaaatattcatggaaaaaaaaaaaaaaa

SEQ ID NO: 2314 - DNA, 6426 bp, Homo sapiens
gcgccaccagggcagcagccgccgcagccgccgccgctgggcagaggagccggagacgcgagcgggcgaggtggcggcggcggcggagcgggagcgggtaccgggcgcgggcagagcgcggcggcgcggagacggggttttgccatgttgacctggctggtctcgaactcctgaacgcaagtgatccgcctgcctcagcctcccaaggtgctgggattacaggcacgagccactgtgcctggcctcaactgttgcttcttataaaggtgtgttccagagaacaagccttcagacatttgctatattgacgctgagctgtcaggggactcaggcttatgaggaggtattgttacacaaaacagtgtctagtgaagacgacaagaaagaggggaaaggatcggaaaaagaagctaaaatactatagaaaaccatgagatctattcgatcttttgctaatgatgatcgccatgttatggtgaaacattcaacaatctatccatctccggaggaacttgaagctgttcagaatatggtatctactgttgaatgtgctcttaaacatgtctcagattggttggatgaaacaaataaaggcacaaaaacagagggtgagacagaagtgaagaaagatgaggccggagaaaactattccaaggatcaaggtggtcggacattgtgtggtgtaatgaggattggcctggttgcaaaaggcttgctgattaaagatgatatggacttggagctggttttaatgtgcaaagacaaacccacagagaccctgttaaatacagtcaaagataatcttcctattcagattcagaaactcacagaagagaaatatcaagtggaacaatgtgtaaatgaggcatctattataattcggaatacaaaagagcccacgctaactttgaaggtgatacttacctcacctctaattagggacgaattggagaagaaggatggagaaaatgtttcgatgaaagatcctccggacttattggacaggcagaaatgcctgaacgccttggcgtctcttcgacatgccaaatggtttcaggcaagggcaaatggattaaaatcatgtgtaattgtcctccgcattctgcgtgatttgtgcaacagagtccccacatgggcaccattgaaaggatggccactagaacttatatgtgaaaagtctataggtacttgtaatagacctttgggcgctggggaggccttgagacgagtaatggagtgtttggcatctggaatactacttcctgggggtcctggtcttcatgatccttgtgagcgagacccaacagatgctctgagctatatgaccatccagcaaaaagaagatattacccacagtgcacagcatgcactcagactatcagcctttggccagatttacaaagtgctggagatggacccccttccatctagtaagccttttcagaagtattcctggtcagttactgataaagaaggtgctgggtcttcagctctaaagaggccatttgaagatggattaggggatgataaagaccccaacaagaagatgaaacgaaacttaaggaaaattctggatagtaaagcaatagaccttatgaatgcactaatgaggctaaatcagatcaggcctgggcttcagtataagctcctatctcagtctggccccgttcatgccccagtcttcacaatgtctgtagatgtggatggcacaacatatgaagcctcaggaccatccaagaaaacagcaaaacttcacgtagcggtgaaggtattgcaggcaatgggatatccaacaggctttgatgcagatattgaatgtatgagttccgatgaaaaatcagataatgaaagtaaaaatgaaacagtgtcttcaaactcaagcaataatactggaaattctacaactgaaacctccagtaccttagaggtaagaactcagggccctatcctcacagcaagtggcaaaaaccctgtaatggagctcaatgaaaaaagaagaggtctcaagtatgaactcatctcagagactggtggaagccatgacaagcgctttgtaatggaggtagaagtagatggacagaaattcagaggcgcaggtccaaataagaaagtggcaaaggcgagtgcagctttagctgccttggagaaactgttttctggacccaatgcggcaaataataagaaaaagaagattatccctcaggcaaagggcgttgtgaatacagctgtgtctgcagcagtccaagctgttcggggcagaggaagaggaactctaacaaggggagcttttgttggggcgacagctgctcctggctacatagctccaggctatggaacaccatatggttacagcacagctgcccctgcctatggtttacccaagagaatggttctgttacccgttatgaaatttccaacatatcctgttccccactactcattcttttagcaaatgacagaagctaattcctattgaacaacaatacagtacaacacagaatgttagagaaaaagcctttttatcctgctttctttgaacacatacttgatcaaaattatttgtaaagaacatctttcctactttttgattttaacaaatgcaaatttagttctctaaaacttgaaaaaaaaaaaagaaaccagttctgtgaaaacggtacctcatttctggaaaataacttataccagcccttctgttctagggaaataaaagtctagcagttcaaagtttaagttttaagagacgtatcagattatgtaaaattaaatttgtgaaggatgtatagagtctcaaacactgatcacaaataaactgctttgttgtaacacagagtactgcctggttcctgatgcagtcactgattcttagttgattgatatgtatttgccccagggcactttaatttgggctgtagttattttttttaatacaatagagacttttcatttaactttaactttgtaaatattgaagtgtgtaataaagccaataaaatatgggtttgaatattgttttagcttattatttttgatatgttttggtatcaaattacaaggaattgaaaactaataacttagccctagaagcccattcacttgtaagcaaagtgctaaaacaaagcaaaggtgattgttagtttgagccagtctactcactttgtaagccctttgtactcctgttgtacaagggccatccccatgataaaggttccattctgttatttgagcattgcttattaaaatgatggcactacccagagatggggaaggagaatgtgattatcctagtttatgaatttccaagtttttaaaaataataaattaatcaatcaatcaccctctcttgttcttgtggccttcttcactctgtaagatattgtgttcactccctggcttttttcatgcagatagaagattagtgattttgctgggattcattgaagggtctcctttcctcttcaattacatcagaatctaaagcagcaacagggtccccataaaaacttgctcttcgattgtcccagttcttgttgagtgctgctgtgaaaagtgacaggtttcagccatgggtcagcatttctttttaagacacctgatgatgctggtggaaatggatcagtgggtaacattgtgctgttctgtaaagggtgcagacctaagtcctccacttgcattctcaccttgtttggaaagccaatgatgttactaggtcaatggtttcattaaggtactcacccccatgaaggagcagcagtgtggtcccctgtcaatatttataaggcaccatgtcttaaaaatgtctgtttttagtatgaattagctttcattttccctattcagttctgcttttgggaacttgacagggcccatccatgagaatgggcttcacaaaatatggcaaatgtatgtaccaaattccttcgggaccactaaataaaggtgaaatgggcaatgtacaacaaatgttagtgtcacttctcagatatatattacacaatgattagtttgtttcttctccttggtcttttgtctttattagtggtgggtgatactttaataaaacctcatcacttgctggaaatagctgtaacttatcattctcatcctgtgcattagtggctagacataaacaagagggcccatttcagctgggagttttcatgtttcattgatgcgttttgctgacctatggatgaaacagagccatcactgagaagaaaaagcatggctgatagtgtccagtttttattaattaaatctttacagtagtcctcattgtctttggaatactattaattggcagctgcggctgtattgttatttgaaattggtcatcaaatttggattccacgttggaatctctagatatttctcgttagaaaattcttttgaagtagctgactctgcttcataactcacgcgctctgtaatggtgaaaagggagctgtgctgttttccaacatgatggcagtcatttcaaatggtttctaccaagtcttttttttttttttttaattttgttgtttgttggaagttactaaccatgttgtaaacctgcccagttgctgcaaacttttacatttctctgctttacttaaaataatcgagctgtcagtcctttgttagaagtggtaaccatgcaagttcaactgtttaaattctgtaatgaattaagtgtccccccacctgttgcccttcccacccttccattttgtaatgaaaattccacttacagctgaaagagcagagaaatataaatgaagctcttggcttcaccaaattgcctgagattaacatgaagttttgcttctctgctcttttctccactgtaggtggttttttcattgacagcccctattgccagcctctgagcgtcgcaccatttattattcacttgggccctcaagatttcttctctgacttctagaaccatcaggttgtctggcttgaaatggcaatttctatgtcttggtcttaagagcaatgtgacaccctgaggctatccagctttcagacactccactctgacaccctctttttgaaagcaatgactgatcattttaaagaagagcaatactttgttcaaagccacggtgtctgttttaaaacttttcctttggaaacctagcaatatctgtacttaacccctttttagcatagtttcttgtcagggagtttacaggtcagtgtagagcttaaaattagcgtgtgagctgtgctatgttctgacagttttttacactttttagcacataaatagttacattcctgactgcgtcagttagcgttactataatttctcagagataggggtcctccttgaagccatatcctctgcacggggactggcccctagccagggatgtggcttgcagcttgtgtttcttcaggctgcaggagtaccccatctcttgtgcaaggtaattggtccagtagatttccaacatacctcatgctgactagatgaagtgcatgggtggtgaagtaaggagttgagtttatatagttctgaagtcgtttgtagtctctctcaaattgttagcctggggaacaaaccactgagagattttgctggtattggccttttctttttttttttttttttaattttgggtgaatgtttgaaaatcatgaatcagccaccattattaattgaagagctgggaatacctcgttaatgtatttttaaaactggtgttggaccctctgtgtatttcaggttaatacttttaagcagttttcagcacgtttatctcactttattctcgttctcctcggaccttcgtagccatatcacttgtataaaataggctgagatatagtgactgtaagctgtgatctcagtatacaaaggtaagctcttttattttctgattaaagagaaaaatagtcaattaagacaacatgcatatatgacaatcatatatgatgtatttgatctcttaggtcatatgtcatcgcattacctttaaaaattgtatggtctaaatgtaaaatagttatttttcaacatttgttttaatacccttgtaactgctttttactcaagacagacatttcacttacactaagtgtgtgtgtgtgtgtgtgtgtgtgtagaaacttaggatataacacgtatgtaaattacacacacatacctgtttaaatgtaagaattcagtgataggaacagttcatctaagaagattttaatgacagggcactcttttggccaaagcagtggaatttcctaagcagcaaggttggtaatagtgctggtaggatctgtatgtgtaagctgttacacaagctgaggatcaaagtgccaatttctcaaggagaaaaacttctccgagaaatgaaagtctctgatctgtgttgtatgccctaatacaacaacagcaagaagccatagaaaaaagcaatagaaaatgaaaaaaaaaaa

SEQ ID NO: 2315 - DNA, 468 bp, Homo sapiens; identical to SEQ ID NO: 1901

SEQ ID NO: 2316 - DNA, 7730 bp, Homo sapiens; identical to SEQ ID NO: 2278

SEQ ID NO: 2317 - DNA, 1789 bp, Homo sapiens
aggcgcgcggggattggcgggatgcggcgcgccgcgcgggtgagacatcggtatccaggcacgataaatttccaagtggacacaatgtctggtgtcaactacagctgttctccttcttttcccagtatcctttgggtgcagtgagacaccaggagagctgctgctttgggggatggacaggggcagcaggaatgcctttgtgttttcgcagtgaacctccttggcctgggcgaagctgtgtggaccaagcaagtcaggagtgtggccatgttttctgagcaggctgcccagagggcccacactctactgtccccaccatcagccaacaatgccacctttgcccgggtgccagtggcaacctacaccaactcctcacaacccttccggctaggagagcgcagctttagccggcagtatgcccacatttatgccacccgcctcatccaaatgagacccttcctggagaaccgggcccagcagcactggggcagtggagtgggagtgaagaagctgtgtgaactgcagcctgaggagaagtgctgtgtggtgggcactctgttcaaggccatgccgctgcagccctccatcctgcgggaggtcagcgaggagcacaacctgctcccccagcctcctcggagtaaatacatacacccagatgacgagctggtcttggaagatgaactgcagcgtatcaaactaaaaggcaccattgacgtgtcaaagctggttacggggactgtcctggctgtgtttggctccgtgagagacgacgggaagtttctggtggaggactattgctttgctgaccttgctccccagaagcccgcacccccacttgacacagataggtttgtgctactggtgtccggcctgggcctgggtggcggtggaggcgagagcctgctgggcacccagctgctggtggatgtggtgacggggcagcttggggacgaaggggagcagtgcagcgccgcccacgtctcccgggttatcctcgctggcaacctcctcagccacagcacccagagcagggattctatcaataaggccaaatacctcaccaagaaaacccaggcagccagcgtggaggctgttaagatgctggatgagatcctcctgcagctgagcgcctcagtgcccgtggacgtgatgccaggcgagtttgatcccaccaattacacgctcccccagcagcccctccacccctgcatgttcccgctggccactgcctactccacgctccagctggtcaccaacccctaccaggccaccattgatggagtcagatttttggggacatcaggacagaacgtgagtgacattttccgatacagcagcatggaggatcacttggagatcctggagtggaccctgcgggtccgtcacatcagccccacagcccctgacactctaggttgttaccccttctacaaaactgacccgttcatcttcccagagtgcccgcatgtctacttttgtggcaacacccccagctttggctccaaaatcatccgaggtcctgaggaccagacagtgctgttggtgactgtccctgacttcagtgccacgcagaccgcctgccttgtgaacctgcgcagcctggcctgccagcccatcagcttctcgggcttcggggcagaggacgatgacctgggaggcctggggctgggcccctgactcaaaaaagtggttttgaccagagaggcccagatggaggctgttcattccctgcagtgtcggcattgtaaataaagcctgagcacttgctgatgcgaaaaaaaaaaaaaaa

SEQ ID NO: 2318 - DNA, 6279 bp, Homo sapiens; identical to SEQ ID NO: 2200

SEQ ID NO: 2319 - DNA, 3322 bp, Homo sapiens
atccccgcctcccctcctgcccaggtgactgactaatccgccgccttcaggagacagaattggccaaggcctgaaggccccggagtgcaccagcggcatgtacaaagagaccgtctactccgccttcaatctgctcatgcattacccacccccctcgggagcagggcagcacccccagccgcagcccccgctgcacaaggccaatcagcccccccacggtgtcccccaactctctctctacgaacatttcaacagcccacatcccacccctgcacctgcggacatcagccagaagcaagttcacaggcctctgcagacccctgacctctctggcttctactccctgacctcaggcagcatggggcagctcccccacactgtgagctggttcacccacccatccttgatgctaggttctggtgtacctggtcacccagcagccatcccccacccggccattgtgcccccctcagggaagcaggagctgcagcccttcgaccgcaacctgaagacacaagcagagtccaaggcagagaaggaggccaagaagccaaccatcaagaagcccctcaatgccttcatgctgtacatgaaggagatgagagccaaggtcattgcagagtgcacacttaaggagagcgctgccatcaaccagatcctgggccgcaggtggcacgcgctgtcgcgagaagagcaggccaagtactatgagctggcccgcaaggagaggcagctgcacatgcagctatacccaggctggtcagcgcgggacaactacgggaagaagaagaggcggtcgagggaaaagcaccaagaatccaccacagagacaaactggcccagagaactcaaggatggtaatggacaagagtcactgtccatgtcttcttcctctagcccagcttgaggactgggatggctgggcaaggaagccataggcattgcggccccttgccttggtgcagatgtgagtcccacaaacacatctggagaagctcaaaggccgggactgggagatgactcccttggaagacaggagagatgactcccttggaagacagatgacagcccataggcctagtgacaaaaggcccctttgccaccttgtggctgttctgggaactgcacctgtcctaggtctgggccagaccaagcagaatggcagtctgaggacactgacttaccacccaagtcccaggaagagaggacaaggaatcagccaggcctgtgcaaaggcagcattttttggttgtggtgtatgactatgaattcaccctctgtttacagataactctcttcactattcctaggaggaaaaagaaatgcattcggtacttacccggagaaggccgctgccccagccccgttccttccgatgacagtgctctaggctgccccgggtccccagctccccaggactcaccctcataccatctgctgccccgcttccccacagaactgcttactagccctgcggagccggcacctacatccccaggtctctccactgctctcagcctcccaaccccagggcccccacaggccccccgcagcaccctgcagagcacacaggtacagcaacaggaatctcagagacaggtggcctagcaggcacaggacacctggccgcctccaggagcctaccccctgaaagtgacagagacccagatctcatggaaactggccaggggtcctgttaacgtcatctcagggtccagaccctgaagatttcagaggctgcaggacttctgcctgaacctggggtcatcgattcaaactgctccaagtggtgggaatcagatctgtcttgatgtgtcatctaattaagggaatcccttgtacctatggctgcctgcatctattctttgtaccatctgtcttgccagccagaagcctctgcctccctagcttttctgctataggtcagagatgggctgaactgagcctagctaccttctctacccatctcccccatcccccactgccacaccctccccattcagacacttcatggaccaagaatgagctggtttgtcaaacaacatgtgagcatggtcacaagcacaaagctcaagatgacagctcttctaaggaaatggagaagctctgtttataaaaacaaaaacaaaaccagctgctactcataagttggaccagaggaagccccttactatgatctcaggagcttgcaagaagcaggaaggggaatggaataggttaagtttaggcctatcaacctaagcaacagaaataatctgacactaccttatcaggcaaattggggaggggagggtgtatctagctctagttcaaattatttggaagtgttccctgagaaacccaccagcctaagaagctctggccccaggcttgtcactagcagctgcagtcaacagttcaaagaagtcatggcccaaatccagtgtgcacccctccccattcacagagcctttttcacaattccatttccagttcatctatggcagtccagccagctcctgggcagcttgagagggcaaacccaaaacctcatgacagccagagcctgtctttcagcattcagtccgcctggccggctccagtttccccatggggctgcgggacagaggaccattacaactagatcaaggagcccagaaaacctccagtagtggacaacaggttttcaccatagcctacgttaacccatttttgagccaagcttcaaccctcagccttgaaaaacaagtctttaatttaatttttgttttttgcctaaatccaaagaaaaagggctgccgggccaggcgcggtggctcacgcctgtaatcccagcactttggcaggccgaggcaggtggatcacctgacgtcagtagtttgagaccagcctggccaacatggtgaaaccctgtatctactaaaaatacaaaaattagccggacgtggtggtgcgcgcatgtaatcccagctactcgggaggctgaggcggaagaatcacttgaacccgggaggcggaggttccagtgagccgagatggcgctattgcactccagtctgggtaacagggagactgcatctcaaaaaaaaaaaaaaaaaaaaaaaagggctgtccatgtattcacacacccctcaaaaaaagcctttagttcctactttagccactggtttctcagaatccaaagatcacatattctagtgtaacactgcaagaagtcttgagaaaaagattattgtagtgttcaaaatatttttgtattgttaatgcatcatcatagaaaaacttttaaacatgagaataaagatactttttactgggtttgtttttcaaagcctgaaaaaaa

SEQ ID NO: 2320 - DNA, 2263 bp, Homo sapiens
atgcgccgcgctcgctcgcgggagggcatggcgggggccgtgccgggcgccatcatggacgaggactactacgggagcgcggccgagtggggcgacgaggctgacggcggccagcaggaggatgattctggagaaggagaggatgatgcggaggttcagcaagaatgcctgcataaattttccacccgggattatatcatggaaccctccatcttcaacactctgaagaggtattttcaggcaggagggtctccagagaatgttatccagctcttatctgaaaactacaccgctgtggcccagactgtgaacctgctggccgagtggctcattcagacaggtgttgagccagtgcaggttcaggaaactgtggaaaatcacttgaagagtttgctgatcaaacattttgacccccgcaaagcagattctatttttactgaagaaggagagaccccagcgtggctggaacagatgattgcacataccacgtggcgggaccttttttataaactggctgaagcccatccagactgtttgatgctgaacttcaccgttaagcttatttctgacgcagggtaccagggggagatcaccagtgtgtccacagcatgccagcagctagaagtgttctcgagagtgctccggacctctctagctacaattttagatggaggagaagaaaaccttgaaaaaaatctccctgagtttgccaagatggtgtgccacggggagcacacgtacctgtttgcccaggccatgatgtccgtgctggcccaggaggagcaggggggctccgctgtgcgcaggatcgcccaggaagtgcagcgctttgcccaggagaaaggtcatgacgccagtcagatcacactagccttgggcacagctgcctcctaccccagggcctgccaggctctcggggccatgctgtccaaaggagccctgaaccctgctgacatcaccgtcctgttcaagatgttcacaagcatggaccctcctccggttgaacttatccgcgttccagccttcctggacctgttcatgcagtcactctttaaaccaggggctcggatcaaccaggaccacaagcacaaatacatccacatcttggcgtacgcagcaagcgtggttgagacctggaagaagaacaagcgagtgagcatcaataaagatgagctgaagtcaacgtcaaaagctgtcgaaaccgttcacaatttgtgttgcaacgagaacaaaggggcctctgaactagtggcagaattgagcacactttatcagtgtattaggtttccagtggtagcaatgggtgtgctgaagtgggtggattggactgtatcagaaccaaggtactttcagctgcagactgaccatacccctgtccacctggcgttgctggatgagatcagcacctgccaccagctcctgcacccccaggtcctgcagctgcttgttaagctttttgagactgagcactcccagctggacgtgatggagcagcttgagttgaagaagacactgctggacaggatggttcacctgctgagtcgaggttatgtacttcctgttgtcagttacatccgaaagtgtctggagaagctggacactgacatttcactcattcgctattttgtcactgaggtgctggacgtcattgctcctccttatacctctgacttcgtgcaacttttcctccccatcctggagaatgacagcatcgcaggtaccatcaaaacggaaggcgagcatgaccctgtgacggagtttatagctcactgcaaatctaacttcatcatggtgaactaatttagagcatcctccagagctgaagcagaacattccagaacccgttgtggaaaaaccctttcaagaagctgttttaagaggctcgggcagcgtcttgaaaatgggcaccgctgggaggaggtggatgacttctttacaaaggaaaatggtagcagcttcagtgagaaactgcccttacaaacagtcccttctctgctgtcaatccaatactgctcccaaatcctgttttcagtgttcatttccctcaaggcaggcgctgggctcccacgacccctcaggacagatctggccgtcagccgcgggccgctgggaactccactcggggaactcctttccaagctgacctcagttttctcacaagaacccagttagctgatgttttattgtaattgtcttaatttgctaagaacaagtaataagtaaatttttaaaaagcctttctgctgggttggattaaaaaaaa

SEQ ID NO: 2321 - DNA, 3322 bp, Homo sapiens; identical to SEQ ID NO: 2319

SEQ ID NO: 2322 - DNA, 3020 bp, Homo sapiens
agggccgggaaacacgataaaggggacatgccgggagttgcagtaccctcaggaaggtagcgtcttgatctgcgtggcgtggttctgtgccttgggaagagatgaatgggaagcggccagcggagcccggcccagcccgggtgggaaaaaagggaaagaaggaggtgatggcggagttttcggacgctgttacggaagaaaccttgaaaaagcaggtggctgaggcctggagccgcaggacgccgttcagtcacgaagtcattgtcatggacatggacccttttcttcactgtgtgatcccaaacttcatccaaagccaagacttcttagaagggcttcagaaggaactgatgaacttggacttccatgagaagtataatgatttatataagttccagcagtctgatgatttgaagaagagaagagagcctcacatctccactttaaggaaaattctgtttgaagatttccggtcctggctttctgatatttctaaaattgacctggaatcaaccattgacatgtcctgtgctaaatatgaattcactgatgccctgctgtgccatgatgatgagctggaagggcgccggattgccttcatcctgtacctggttcctccctgggacaggagcatgggtggtaccctggacctgtacagcattgatgaacactttcagccgaagcagattgtcaagtctcttatcccttcgtggaacaaactggttttctttgaagtatctcctgtgtcctttcaccaggtgtctgaagtgctgtctgaagaaaagtcacgtttgtctataagtggctggtttcatggtccatcattgactcggcctcccaactactttgaaccccccatacctcggagccctcacatcccacaagatcatgagattttgtatgattggatcaaccctacttatctggacatggattaccaagttcaaattcaagaagagtttgaagaaagttctgaaattctcctgaaggagtttcttaagcctgagaaattcacgaaagtctgtgaggccttggagcatggacatgtggaatggagcagccgaggtccccctaacaaaaggttttatgagaaagctgaggagagtaagcttcctgagatattgaaggagtgcatgaagttatttcgctctgaggcactattcttgctgctctccaacttcacaggcctgaagcttcatttcttggccccttcggaagaagatgagatgaatgataaaaaagaggcagaaaccactgatatcactgaagaagggactagccatagtcctcctgagccagagaataatcagatggccatcagcaacaacagccaacagagcaatgagcagacagacccagagccagaggaaaatgaaacaaagaaagaatcaagtgttcccatgtgccaaggggaactgaggcattggaagaccggtcactacactttaattcatgaccatagcaaggctgaatttgccctagacttaattctgtactgtggctgtgaaggctgggagccagaatatggcggttttacttcttacattgccaaaggtgaagatgaagagctgctaacagtgaatccagaaagcaattctttggcattggtctacagagacagagagactctgaaatttgtcaagcatattaaccaccgaagcctggaacaaaagaaaaccttcccaaacagaacaggtttctgggacttttcattcatctattatgaatgacagcactgggcaaagctgaacaaaaatgtgacccttcgtaattactgggaagtctgaaagagctaagcatggagtcaaggagaactacatggtagcttgcctgacagtgttcttaaaactggttgtcttttactaggactcataatgattgtcctcaaccgagaccttgagcttgcagctaagtacttatctcttgattaaaaaaaaaaagttggcttttttttttttaacatttagtcctttttccatattggcttcttcagtgaatttttaagttcaatttgtttttattgaggtaaaatatttataacataaaactgaccagcttacccatttttaaatatgcaattcagtggattaagtacattctcattgttgtccagccatcaccatcatccatctccagaagttttccatcttcccaaattctgtgcccattgaacaataactccccacctccccttcccctagcaacagccataccttttgtctctatcatcaacttcactactcatatttctcatgtaagtggaatcatacagtatttgtccttttgtgactggtttcacttagcataaagtctttaagatgcatccatgtttccagtgtttcggtttttttagaaaaactcatacgtgattgcagccgggcatggtggctcacgcctgtaatcccagcacttgggaggccaaggcaggcggatcacctgaggtcaggagttaaagaccagcctgacaaacatggagaaaccccatctctactaaaaatacaaaattagctgggcgtggtggcacatgcctgtaatcccagctactcaggaggctggggcaggagaattggttgaacccaggaggcggaggttgcagtgagccgagattgtgccactgcactccagcctgggcaacaagagtgaaactctgtctcaaaaaaaaaaaagaagaaaaaaacataagtgattgcagaattttgttcttctcataatttctggtttagaaaattatggagccttacatcctgatcatgctgggccttagaattctgacacagtgagtcatcacatttcctcccactgcctgtggccttgttccaccatgactctcacagtacagtgtaggcttagtgtagtattattcccttggaaagggtctggcctaccatcacatgccccaagaaacttctggttggtaaagaagataggctgcttattgccatgtgtagtcacttccaagtgcccactgcctttccatcctgcaattgtggcctgtgtataattaaatgattttagcctca

SEQ ID NO: 2323 - DNA, 2197 bp, Homo sapiens; identical to SEQ ID NO: 923

SEQ ID NO: 2324 - DNA, 3699 bp, Homo sapiens; identical to SEQ ID NO: 2103

SEQ ID NO: 2325 - DNA, 6095 bp, Homo sapiens; identical to SEQ ID NO: 1527

SEQ ID NO: 2326 - DNA, 2586 bp, Homo sapiens; identical to SEQ ID NO: 2246

SEQ ID NO: 2327 - DNA, 845 bp, Homo sapiens
agcacacacacatctgcacctcaaccacagactacacttgctgaactggctcctggggccatgaggctgtcactgccactgctgctgctgctgctgggagcctgggccatcccagggggcctcggggacagggcgccactcacagccacagccccacaactggatgatgaggagatgtactcagcccacatgcccgctcacctgcgctgtgatgcctgcagagctgtggcttaccagatgtggcaaaatctggcaaaggcagagaccaaacttcatacctcaaactctggggggcggcgggagctgagcgagttggtctacacggatgtcctggaccggagctgctcccggaactggcaggactacggagttcgagaagtggaccaagtgaaacgtctcacaggcccaggacttagcgaggggccagagccaagcatcagcgtgatggtcacagggggcccctggcctaccaggctctccaggacatgtttgcactacttgggggagtttggagaagaccagatctatgaagcccaccaacaaggccgaggggctctggaggcattgctatgtgggggaccccagggggcctgctcagagaaggtgtcagccacaagagaagagctctagtcctggactctaccctcctctgaaagaagctggggcttgctctgacggtctccactcccgtctgcaggcagccaggagggcaggaagcccttgctctgtgctgccatcctgcctccctcctccagcctcagggcactcgggcctgggtgggagtcaacgccttcccctctggactcaaataaaacccagtgacctcaaaaaaaaaaaaaaaaaaa

SEQ ID NO: 2328 - DNA, 3967 bp, Homo sapiens; identical to SEQ ID NO: 2231

SEQ ID NO: 2329 - DNA, 1970 bp, Homo sapiens
ccgagtggggctgaacttccggcctcaggacgcaggcgcgggccgctcatttcgctctttccggcggtgctcgcaagcgaggcagccatgtcttatcccgctgatgattatgagtctgaggcggcttatgacccctacgcttatcccagcgactatgatatgcacacaggagatccaaagcaggaccttgcttatgaacgtcagtatgaacagcaaacctatcaggtgatccctgaggtgatcaaaaacttcatccagtatttccacaaaactgtctcagatttgattgaccagaaagtgtatgagctacaggccagtcgtgtctccagtgatgtcattgaccagaaggtgtatgagatccaggacatctatgagaacagctggaccaagctgactgaaagattcttcaagaatacaccttggcccgaggctgaagccattgctccacaggttggcaatgatgctgtcttcctgattttatacaaagaattatactacaggcacatatatgccaaagtcagtgggggaccttccttggagcagaggtttgaatcctattacaactactgcaatctcttcaactacattcttaatgccgatggtcctgctccccttgaactacccaaccagtggctctgggatattatcgatgagttcatctaccagtttcagtcattcagtcagtaccgctgtaagactgccaagaagtcagaggaggagattgactttcttcgttccaatcccaaaatctggaatgttcatagtgtcctcaatgtccttcattccctggtagacaaatccaacatcaaccgacagttggaggtatacacaagcggaggtgaccctgagagtgtggctggggagtatgggcggcactccctctacaaaatgcttggttacttcagcctggtcgggcttctccgcctgcactccctgttaggagattactaccaggccatcaaggtgctggagaacatcgaactgaacaagaagagtatgtattcccgtgtgccagagtgccaggtcaccacatactattatgttgggtttgcatatttgatgatgcgtcgttaccaggatgccatccgggtcttcgccaacatcctcctctacatccagaggaccaagagcatgttccagaggaccacgtacaagtatgagatgattaacaagcagaatgagcagatgcatgcgctgctggccattgccctcacgatgtaccccatgcgtattgatgagagcattcacctccagctgcgggagaaatatggggacaagatgttgcgcatgcagaaaggtgacccacaagtctatgaagaacttttcagttactcctgccccaagttcctgtcgcctgtagtgcccaactatgataatgtgcaccccaactaccacaaagagcccttcctgcagcagctgaaggtgttttctgatgaagtacagcagcaggcccagctttcaaccatccgcagcttcctgaagctctacaccaccatgcctgtggccaagctggctggcttcctggacctcacagagcaggagttccggatccagcttcttgtcttcaaacacaagatgaagaacctcgtgtggaccagcggtatctcagccctggatggtgaatttcagtcagcctcagaggttgacttctacattgataaggacatgatccacatcgcggacaccaaggtcgccaggcgttatggggatttcttcatccgtcagatccacaaatttgaggagcttaatcgaaccctgaagaagatgggacagagaccttgatgatattcacacacattcaggaacctgttttgatgtattataggcaggaagtgtttttgctaccgtgaaacctttacctagatcagccatcagcctgtcaactcagttaacaagttaaggaccgaagtgtttcaagtggatctcagtaaaggatctttggagccagaaaaaaaaaaaaaaaaaaaaaa

SEQ ID NO: 2330 - DNA, 2787 bp, Homo sapiens
ctgctcccacgagggggcggggccaagatggcgccgagcgccgggtgagcagcgtctcggctgccgctagagttttcctgctccccgcgctcgggtggcgggggcgggtctgagtggtaccccggaggagaccctttgaaggtcccttgtggggactggaaagaggacggttggttgtgtgtctgtgctcgtggggaccccgtgtgtgtgcctgcattggagagatgttgcaggagatggggtgggctctctgaacctcctttcgcgctgcccggggatcttcgacctgcttctctgctgggatctcgcttaagttaacccttccctgggacgccttcctgccgcctccactgatctgaggagatcctgtgactgtagcgtgttttatgagcctttactggcagagggtaccgccgggtattgaaggattcgtaggagttcgccagggaagtgggacacgaccccctcttgtaaacccggcgccaggcacagaggtctccgtctctccaccgggggcttcatccttccagggaggagaagagggactccagaatggctgaggagaagaagctgaagcttagcaacactgtgctgccctcggagtccatgaaggtggtggctgaatccatgggcatcgcccagattcaggaggagacctgccagctgctaacggatgaggtcagctaccgcatcaaagagatcgcacaggatgccttgaagttcatgcacatggggaagcggcagaagctcaccaccagtgacattgactacgccttgaagctaaagaatgtcgagccactctatggcttccacgcccaggagttcattcctttccgcttcgcctctggtgggggccgggagctttacttctatgaggagaaggaggttgatctgagcgacatcatcaatacccctctgccccgggtgcccctggacgtctgcctcaaagctcattggctgagcatcgagggctgccagccagctatccccgagaacccgcccccagctcccaaagagcaacagaaggctgaagccacagaacccctgaagtcagccaagccaggccaggaggaagacggacccctgaagggcaaaggtcaaggggccaccacagccgacggcaaagggaaagagaagaaggcgccgcccttgctggagggggcccccttgcgactgaagccccggagcatccacgagttgtctgtggagcagcagctctactacaaggagatcaccgaggcctgcgtgggctcctgcgaggccaagagggcggaagccctgcaaagcattgccacggaccctggactgtatcagatgctgccacggttcagtacctttatctcggagggggtccgtgtgaacgtggttcagaacaacctggccctactcatctacctgatgcgtatggtgaaagcgctgatggacaaccccacgctctatctagaaaaatacgtccatgagctgattccagctgtgatgacctgcatcgtgagcagacagttgtgcctgcgaccagatgtggacaatcactgggcactccgagactttgctgcccgcctggtggcccagatctgcaagcattttagcacaaccactaacaacatccagtcccggatcaccaagaccttcaccaagagctgggtggacgagaagacgccctggacgactcgttatggctccatcgcaggcttggctgagctgggacacgatgttatcaagactctgattctgccccggctgcagcaggaaggggagcggatccgcagtgtgctggacggccctgtgctgagcaacattgaccggattggagcagaccatgtgcagagcctcctgctgaaacactgtgctcctgttctggcaaagctgcgcccaccgcctgacaatcaggacgcctatcgggcagaattcgggtcccttgggcccctcctctgctcccaggtggtcaaggctcgggcccaggctgctctgcaggctcagcaggtcaacaggaccactctgaccatcacgcagccccggcccacgctgaccctctcgcaggccccacagcctggccctcgcacccctggcttgctgaaggttcctggctccatcgcacttcctgtccagacactggtgtctgcacgagcggctgccccaccacagccttcccctcctccaaccaagtttattgtaatgtcatcgtcctccagcgccccatccacccagcaggtcctgtccctcagcacctcggcccccggctcaggttccaccaccacttcgcccgtcaccaccaccgtccccagcgtgcagcccatcgtcaagttggtctccaccgccaccaccgcaccccccagcactgctccctctggtcctgggagtgtccagaagtacatcgtggtctcacttcccccaacaggggagggcaaaggaggccccacctcccatccttctccagttcctcccccggcatcgtccccgtccccactcagcggcagtgccctttgtggggggaagcaggaggctggggacagtccccctccagctccagggactccaaaagccaatggctcccagcccaactccggctcccctcagcctgctccgtgatgctccacctgccagcccccggattcccacacatgcagacatgtacacacgtgcacgtacacacatgcatgctcgctaagcggaaggaagttgtagattgcttccttcatgtcactttctttttagatattgtacagccagtttctcagaataaaagtttggtttgtaagttctgaaaaaaaaaaaaaaaaaaaaaaaaaa

SEQ ID NO: 2331 - DNA, 6541 bp, Homo sapiens
acgtcagagggaaccgggcggagcggccaacatggcggaacgcaggagacacaagaagcggatccaggaagttggtgaaccatctaaagaagagaaggctgtggccaagtatcttcgattcaactgtccaacaaagtccaccaatatgatgggtcaccgggttgattattttattgcttcaaaagcagtggactgtcttttggattcaaagtgggcaaaggccaagaaaggagaggaagctttatttacaaccagggagtctgtggttgactactgcaacaggcttttaaagaagcagttttttcaccgagccctaaaagtaatgaaaatgaaatatgataaagacataaagaaagaaaaagataaaggaaaagctgaaagtggaaaagaagaagataaaaagagcaagaaagaaaatataaaggatgagaagacaaaaaaagaaaaagagaaaaaaaaagatggtgaaaaggaagaatccaaaaaggaggaaactccaggaactcctaaaaagaaggaaactaagaaaaaattcaaacttgagccacatgatgatcaggtttttctggatggaaatgaggtgtatgtatggatctatgacccagttcactttaaaacatttgtcatgggattaattcttgtgattgcagtaatagcggccaccctcttccccctttggccagcagaaatgagagtaggtgtttattacctcagtgtgggtgcaggctgttttgtagccagtattcttctccttgctgttgctcgatgcattctatttctcatcatttggctcataactggaggaaggcaccacttttggttcttgccaaatctgactgctgatgtgggcttcattgactccttcaggcctctgtacacacatgaatacaaaggaccaaaagcagacttaaagaaagatgagaagtctgaaaccaaaaagcaacagaagtccgacagtgaggaaaagtcagacagtgagaaaaaggaagatgaggaggggaaagtaggaccaggaaatcatggaacagaaggctcggggggagaacggcattcagacacggacagtgacaggagggaagatgatcgatcccagcacagtagtggaaatggaaatgattttgaaatgataacaaaagaggaactggaacagcaaacagatggggattgtgaagaggatgaggaagaggaaaatgatggagaaacacctaaatcttcacatgaaaaatcataatctgactaattttgggactgaatgaataagtacaagaggttggattttctatgttggctgattaccatattgaacacatggcatttgtagcattctttaaatctatctactgaaatgtatttgacattcaagcagttatattcggtccttcattttatagaatattggcactattattggtacagtttaaagccattaatatgttttatccatttgataattttacagtaagtaggtctcattcattttgacagttatcaaagatgtactttccacagttaaatttacattaatggcaatttttgatagttttatggctttttactgttagactaatcaaaaataactttaaaaggaacaaagaaactccaacatttcacattatgcatagttatgtagccatttcacagtttctttaagatgtgtaaactcattgtccttgatagtttttatttttcattataaaattataccaggagatttcttttaagattctgagttagcagagttcaaaactattttgtggaaacaagccaactagtaacaatgcagcaacacttctggtttagctaaattatttttccaatgtaggaaatccacactgatttgtacgtctgactgagagaaagatggtcgtctccagcagagaaagtgaacagcatttgttggaaggtgatggctctccctcctccctccccatttcattggcgtaacgtaaagtgtattctgtacataatttacaaataaaacattttattttaattgttacttattatttagatatttctcaacacttaaattcataaaattaagaccatgtaagggtatgtttttagagaaatggaagtttgagtaacccacagaacatctgtgatctttctacagcagcttcagttttgtgccaacattccatgtattttgaatatgagcaaaaactgatcttaagagcagacttaaagtagctttgtacgccttaatgttcattttgatttattttaaatctttacattcagaaatgagatactgtattatcagaccaggaggcattgctgtgaaagataatttcctattctaaaatatcaaatttaaaataaagataatgaaagaaaacataagagaactattggactctaattgctttgaactagttttgcagtttgactttacgtcttatacatcttagttacaagtctttggaaactcttgtttacttatgagcataatcattccttggagttatactaactaataatgaatattaaatgatttttcttcagtcacagtgagagcatcttgctttgtggttgaaataggtagtgtatgtcagtctttgctttaggctgtttctcatctaagtgtttgaattaaagatgttaaatttttctaattgtgaaaaatatgttttctgtatcgacacattttattaaacttggcttgattgcttctttatagtagtccctgtaagtggacataaatgtggctatttgatgttaatgcaactatgtcaaggctgcaatcactttaatagtttctttttagcaaataaatgttcattgatgaagtgcctgggtattttcccgtcccatttgcagagctctactacttcatttccacagtaagcatatatataatgatcacttctgagtttatcaccagtaacattgatacctattttggggtataaacatggtgtttttcagaaataaaaattatttcattaacctttactattactgtgataatacccaggcactcaatattcatcctgaaattttttataatatatgtaatttgtctagtcttaaagacatttggagcatggccaacaggaaggtcagcttcttactgatgtgtgtggattcttacagaatgttagtacaaatttttataaatatttggtgatccctggggggaaatatcattcttactatggttagaaagtgaattagaaatttcagctcagtttctattttactattcaagttgtgtactttaaacaaatataaaaatcaaaaggctgcctctattacaatcctcagtggaatagatggctatctttcttggctaacattaaatattcttgtaccagagcatggaaaatcgtttataattgttaatagaatggcgatttttttttaagaacttcagatttgctatgctgctgtaagtagaaagcatgaagctttttgatcatgtagggcttattgtagagggtatcaattggcctaactaagcaggattgaatttaccagaggctaagttcagatagtaagaataatgcatatgtgattgttcttaaagtcaatgtattaaataaggtatttttccttttccctcttactggatttttcaattttcaaaccatatggcctaggtaactttaattgaaataatatagatttagttgaatactattcaggaagtaataaattttaatatatcacattgaaattatgcagtggtgatgaattttggtgtttcccccctctttctggttttacatcatgaggatcagttagctgctgacaagaaaagtcatcttgtgtcttttgtaaattgaattttttttttaaatctattaggaactggaaaacagcaagtatggttgattctcattattcaaggtagttacgttctataaagtcactgcgaacactgaattagcaaatatagaacctaggggaaatacaaggctagatttctgcaagccactggtcacattttcatcaagcagtcaacatgtaaatttctgttgtaaagacaccttatttaatataatcgattcattaacattgaagtcatgaccaacaacactgtaactcatgcctgaatgaagcttatctgacacataagcttcataaggcacacaacagcctttttacccttaggaacagctttttgcccttagcactatgcttgggggccattttaaacagtgaaatcaaaaaaagaacagaaatgcaaaaaccatggcattagcgtaaaaaggacacgtttatagtatgaaagctggaacatggccttgttcaacctcagctcagaatatgtgtacagcaagttttttgctgtaccacaaaattttaggttaggcaaattcacaaatacggaatccatgaataacgaggatcaactgtacttaactatattttaaagctgtgacatttatctacctggtttatggaatagaatttattgctgaatcatgctccagtatttgagtgatgttttaaatatcctatgtctgaaaataattcctcctaattgtgtggtaatttgcttttactgtttccacagtatttcaggtctttgctcattcactcagtaatactgagcacttaccatgtaccagaattttactaggcacaaccatgaataaaaatacaattctcttgcaccattaaatagtgtgttaagtgctacggcagcaaattgctacatgtgctggatatctcttgttttcccctccagctccactctgctcttgcccacaaagctgacccgaatggaccacagcagtgggctcctatgcctcctggcttctgagtgggtttggccaaggagtgtcctggccagagatcagaggatggtagggtgcctattctcggctcttctcctggggttggggggctgccttagcagccaaaggtcacttctcccaaactccttccctgctttccaggttgccagtccctgcactcttcctttctggccaaggatgatgtcagttctgctgctactagcctggagttgcagaagctactgtgcttcctctttgggtagcctatacctatacttatctcctcataatatcttcatgtaaagaaccatctgtttcttattggaatcaagaccaataccaaggagaaattcctagggaacaaaaattccaatgaggaattgacctctttgtcagatccttatcaccaaacattagaaaagatctcataactttatacagcatgttgtaagcattttgataactaaaatcctgttctagtgaatgtcatgcagataactacacaaggagattaatttaaatttgccttctttggcaagcccttaaaccaatggctaaagcagttagttgtgagtttctgagtaggtcccaatgcgtttatttcatttgtccaacctagcacagagatcctttgatactttaattgcatggcttttccaatcagacgaaatttcagtctgagagaggacatattttctgaggtttatagttttaggattgtccaaaaggcctatgatctcttcttagcatgacagaaagagggaaagataagttaaatttcaagggggtcatatcatcacactttggtcttatttcattttcaatgatttcctagatcactttaacttttttgtgtcatggactcctcagaataatgggttttttttgtttgtttgtttgtttgagatggagtctcactctgtcacccaggctggagtgcagtggcgaaatctcagctcactgcaacctccgcctcctgaggttcaagtgatcctcctgcctcagcctcccaagtagctgggattacaggcacatgccaccacacccagctaatttttgtattttttagtagagacagggtttcaccgtgttggcgagactgatcttgaactcctgacatcaggtgatccacctgcctcggcctcccaaagtgctgggattacaggcatgagccaccatgcctggccagaataatgtttttaaatgcagaaaaggaaatgcatggggttacaagggaaacgaattacactgaagtgtaagctaccaaataatttatgatgtggtagttataggtgtgcatttaatagccagatctacgagtggatgtaataactgctatgatgttgaagtagcataaaacatatattagatatctgcaacaactgtgatgtaacatgaaaatacctgatttctgttgacaaagttactgctagtacaactgtggattgttgtctgcactcgtcattgaaggaaatactaaattttagttttaggctagtgaaattaaagttaatttttcccatccaagttcatgtatcttctgaattctatccgtgaatcccttagaggtctgtgaattgtaggttaagaacccctgccctagctaatcagatccaccaatgtttcaaataggactataacttattcaaaggccaatgatacttcgcataattcaattttaatattattcacatttcatgtcacaaatttagtaagttacatgtgttatgtgatgttttgttttgatagattatatcttactcctaaataaaaagtcaagatttttgtagcaa

SEQ ID NO: 2332 - DNA, 1973 bp, Homo sapiens
ctttgaaaaagacttcttttgagctaactttcttatactggtacctttctaatctcactacaatatgtaacattggtgttcgatctcaagtatttctgaatatattcccctatccacagaaatatactctgggggaaaaaaaatagaacaaattcttgccgtcctgaccattgaacaagagactaattagacaatggggctagaaaaacctcaaagtaaactggaaggaggcatgcatccccagctgataccttcggttattgctgtagttttcatcttacttctcagtgtctgttttattgcaagttgtttggtgactcatcacaacttttcacgctgtaagagaggcacaggagtgcacaagttagagcaccatgcaaagctcaaatgcatcaaagagaaatcagaactgaaaagtgctgaagggagcacctggaactgttgtcctattgactggagagccttccagtccaactgctattttcctcttactgacaacaagacgtgggctgagagtgaaaggaactgttcagggatgggggcccatctgatgaccatcagcacggaagctgagcagaactttattattcagtttctggatagacggctttcctatttccttggacttagagatgagaatgccaaaggtcagtggcgttgggtggaccagacgccatttaacccacgcagagtattctggcataagaatgaacccgacaactctcagggagaaaactgtgttgttcttgtttataaccaagataaatgggcctggaatgatgttccttgtaactttgaagcaagtaggatttgtaaaatacctggaacaacattgaactagaaactcagaaagtggtccttgtgatggaaagagaaaagaaaaaccaattagaataaggcagaatgtacgtgcgtcattggaacacagaaaacatgctggttcatacagcgtttttagtcataatggtcttttttattttgtttgattcattcgagacaacatgtgtgtatgtgtgtgtgtgtgtgtgtagataatgtggtttttgtatggtgtttgatggaaggaataatctttctttgctttcttagtagtatttcaaggtgtttacttttcaattggtgtgcactgaatgcatgtatggaagaatagcgtgaataatgcaatctctttgtcatttttccccttctcagactcttagctcttaaaattcaaagatgggatattctaactggtagtggtgcatcatttttaacccaaatattgcaagcactttaaagatttgaaaccacatttttattgtttgatgtttcattttcagactttttaatgtcagtcattacaattacattgcatgaggaaaatttttccagaacaacagtgtggaatagttctgaattatgctgttctacagatagaaaaaaagtccaaatgcctttaaaaatttacttcttactccacccaacacgtttttgcaaagcaagaagtctttgtaagacaccttaaacaaagtccttcaattctacagcagaggaaataaaatcccccagaagccaaagggctcaccttcacattgttagttcatgacagacccaggtgtgcttcattagagataacatacattccctttggtatcacaggaagttactggggattactcgacctcattacttagctaacgactggataaaatttcttaattgtttgaagtaacattgtattcgtgtttgcattattaatttgaatagaaaataatcacattttcaacccatttatacaaattgttaatgtttctttagagctgtataactatagtttgaactagcaaggaagttattgttttgacaaccagaaattatgcttttctggtgcatgaaacattaattgcaaagggcagtcacatccaactttaataaaatatggtggtctttcttaaaaaaaaaaaaaaaaaaaaaaaaaaaaaaaaaaaaaaaaa

SEQ ID NO: 2333 - DNA, 3284 bp, Homo sapiens
cccgtgcaccctgtcccagccgtcctgtcctggctgctcgctctgcttcgctgcgcctccactatgctctccctccgtgtcccgctcgcgcccatcacggacccgcagcagctgcagctctcgccgctgaaggggctcagcttggtcgacaaggagaacacgccgccggccctgagcgggacccgcgtcctggccagcaagaccgcgaggaggatcttccaggagcccacggagccgaaaactaaagcagctgcccccggcgtggaggatgagccgctgctgagagaaaacccccgccgctttgtcatcttccccatcgagtaccatgatatctggcagatgtataagaaggcagaggcttccttttggaccgccgaggaggtggacctctccaaggacattcagcactgggaatccctgaaacccgaggagagatattttatatcccatgttctggctttctttgcagcaagcgatggcatagtaaatgaaaacttggtggagcgatttagccaagaagttcagattacagaagcccgctgtttctatggcttccaaattgccatggaaaacatacattctgaaatgtatagtcttcttattgacacttacataaaagatcccaaagaaagggaatttctcttcaatgccattgaaacgatgccttgtgtcaagaagaaggcagactgggccttgcgctggattggggacaaagaggctacctatggtgaacgtgttgtagcctttgctgcagtggaaggcattttcttttccggttcttttgcgtcgatattctggctcaagaaacgaggactgatgcctggcctcacattttctaatgaacttattagcagagatgagggtttacactgtgattttgcttgcctgatgttcaaacacctggtacacaaaccatcggaggagagagtaagagaaataattatcaatgctgttcggatagaacaggagttcctcactgaggccttgcctgtgaagctcattgggatgaattgcactctaatgaagcaatacattgagtttgtggcagacagacttatgctggaactgggttttagcaaggttttcagagtagagaacccatttgactttatggagaatatttcactggaaggaaagactaacttctttgagaagagagtaggcgagtatcagaggatgggagtgatgtcaagtccaacagagaattcttttaccttggatgctgacttctaaatgaactgaagatgtgcccttacttggctgattttttttttccatctcataagaaaaatcagctgaagtgttaccaactagccacaccatgaattgtccgtaatgttcattaacagcatctttaaaactgtgtagctacctcacaaccagtcctgtctgtttatagtgctggtagtatcaccttttgccagaaggcctggctggctgtgacttaccatagcagtgacaatggcagtcttggctttaaagtgaggggtgaccctttagtgagcttagcacagcgggattaaacagtcctttaaccagcacagccagttaaaagatgcagcctcactgcttcaacgcagattttaatgtttacttaaatataaacctggcactttacaaacaaataaacattgtttgtactcacaaggcgataatagcttgatttatttggtttctacaccaaatacattctcctgaccactaatgggagccaattcacaattcactaagtgactaaagtaagttaaacttgtgtagactaagcatgtaatttttaagttttattttaatgaattaaaatatttgttaaccaactttaaagtcagtcctgtgtatacctagatattagtcagttggtgccagatagaagacaggttgtgtttttatcctgtggcttgtgtagtgtcctgggattctctgccccctctgagtagagtgttgtgggataaaggaatctctcagggcaaggagcttcttaagttaaatcactagaaatttaggggtgatctgggccttcatatgtgtgagaagccgtttcattttatttctcactgtattttcctcaacgtctggttgatgagaaaaaattcttgaagagttttcatatgtgggagctaaggtagtattgtaaaatttcaagtcatccttaaacaaaatgatccacctaagatcttgcccctgttaagtggtgaaatcaactagaggtggttcctacaagttgttcattctagttttgtttggtgtaagtaggttgtgtgagttaattcatttatatttactatgtctgttaaatcagaaattttttattatctatgttcttctagattttacctgtagttcatacttcagtcacccagtgtcttattctggcattgtctaaatctgagcattgtctagggggatcttaaactttagtaggaaaccatgagctgttaatacagtttccattcaaatattaatttcagaatgaaacataatttttttttttttttttgagatggagtctcgctctgttgcccaggctggagtgcagtggcgcgattttggctcactgtaacctccatctcctgggttcaagcaattctcctgtctcagcctccctagtagctgggactgcaggtatgtgctaccacacctggctaatttttgtatttttagtagagatggagtttcaccatattggtcaggctggtcttgaactcctgacctcaggtgatccacccacctcggcctcccaaagtgctgggattgcaggcgtgataaacaaatattcttaatagggctactttgaattaatctgcctttatgtttgggagaagaaagctgagacattgcatgaaagatgatgagagataaatgttgatcttttggccccatttgttaattgtattcagtatttgaacgtcgtcctgtttattgttagttttcttcatcatttattgtatagacaatttttaaatctctgtaatatgatacattttcctatcttttaagttattgttacctaaagttaatccagattatatggtccttatatgtgtacaacattaaaatgaaaggctttgtcttgcattgtgaggtacaggcggaagttggaatcaggttttaggattctgtctctcattagctgaataatgtgaggattaacttctgccagctcagaccatttcctaatcagttgaaagggaaacaagtatttcagtctcaaaattgaataatgcacaagtcttaagtgattaaaataaaactgttcttatgtcagtttcaaaaaaaaaaaaaaaaaa

SEQ ID NO: 2334 - DNA, 3540 bp, Homo sapiens
accgggcgcgcgcgccgacggggcgggcgcatgcgcaagggggcgcgccgcctctgccccgcggcgagggtgtctatggagaggcggcggccgcggctgctgaggcggaggctgaggcagtggcgatggcgccctttcctgaagaagtggacgtcttcaccgccccacactggcggatgaagcagctggtggggctctactgcgacaagctttctaaaaccaatttttccaacaacaacgatttccgtgctcttctgcagtctttgtatgctactttcaaggagttcaaaatgcatgagcagattgaaaatgaatacattattggtttgcttcaacaacgcagccagaccatttataatgtacattctgacaataaactctccgagatgcttagcctctttgaaaagggactgaagaatgttaagaatgaatatgaacagttaaattatgcaaaacaactgaaagagagattggaggcttttacaagagattttcttcctcacatgaaagaggaagaggaggtttttcagcccatgttaatggaatattttacctatgaagagcttaaggatattaaaaagaaagtgattgcacaacactgctctcagaaggatactgcagaactccttagaggtcttagcctatggaatcatgctgaagagcgacagaagttttttaaatattccgtggatgaaaagtcagataaagaagcagaagtgtcagaacactccacaggtataacccatcttcctcctgaggtaatgctgtcaattttcagctatcttaatcctcaagagttatgtcgatgcagtcaagtaagcatgaaatggtctcagctgacaaaaacgggatcgctttggaaacatctttaccctgttcattgggccagaggtgactggtatagtggtcccgcaactgaacttgatactgaacctgatgatgaatgggtgaaaaataggaaagatgaaagtcgtgcttttcatgagtgggatgaagatgctgacattgatgaatctgaagagtctgcggaggaatcaattgctatcagcattgcacaaatggaaaaacgtttactccatggcttaattcataacgttctaccatatgttggtacttctgtaaaaaccttagtattagcatacagctctgcagtttccagcaaaatggttaggcagattttagagctttgtcctaacctggagcatctggatcttacccagactgacatttcagattctgcatttgacagttggtcttggcttggttgctgccagagtcttcggcatcttgatctgtctggttgtgagaaaatcacagatgtggccctagagaagatttccagagctcttggaattctgacatctcatcaaagtggctttttgaaaacatctacaagcaaaattacttcaactgcgtggaaaaataaagacattaccatgcagtccaccaagcagtatgcctgtttgcacgatttaactaacaagggcattggagaagaaatagataatgaacacccctggactaagcctgtttcttctgagaatttcacttctccttatgtgtggatgttagatgctgaagatttggctgatattgaagatactgtggaatggagacatagaaatgttgaaagtctttgtgtaatggaaacagcatccaactttagttgttccacctctggttgttttagtaaggacattgttggactaaggactagtgtctgttggcagcagcattgtgcttctccagcctttgcgtattgtggtcactcattttgttgtacaggaacagctttaagaactatgtcatcactcccagaatcttctgcaatgtgtagaaaagcagcaaggactagattgcctaggggaaaagacttaatttactttgggagtgaaaaatctgatcaagagactggacgtgtacttctgtttctcagtttatctggatgttatcagatcacagaccatggtctcagggttttgactctgggaggagggctgccttatttggagcaccttaatctctctggttgtcttactataactggtgcaggcctgcaggatttggtttcagcatgtccttctctgaatgatgaatacttttactactgtgacaacattaacggtcctcatgctgataccgccagtggatgccagaatttgcagtgtggttttcgagcctgctgccgctctggcgaatgacccttgacttctgatctttgtctacttcatttagctgagcaggctttctttcatgcactttactcatagcacatttcttgtgttaaccatccctttttgagcgtgacttgttttggccccatttcttacaacttcagaaatcttaatttaccagtgaattgtaatgttgtttctcttgcaaattatacttttggtttagaaagggattaggtcttttcaaaagggtgagaacagtcttacatttttcttttaaatgaaatgctttaaagaatgttggtaatgccatgtcatttaaagtatttcatagataattttgagttttaaagtccatggaggtgattggttctctttacacattaacactgtaccaagctttgcagatcttttccgacacacatgtctgaagacttattttcaaagacagcacatttttggaaactaatctcttttccgtaatatttcctttatttcaatgattctcagaaggccaattcaaacaaacccacatttaaggttctttaggattatagaataaattggcttctgagtgttagctcagtgagctaggaaagcaccaatcgatatttgtttcctttagggatactttgttctcaccactgtccctatgtcatcaaatttgggagagattttttaaaataccacaatcatttgaagaaatgtataaataaaatctactttgaggactttaccaagtaatactgttgtgttgtgatttttattataaatctcaatccaggtttactttagtatagaataggactacatactttgtctttggacctcccatgaacttattaccctgacaaatagttttagacagatactgaattttattgagctgaattttctttttgaaatgagttattcagtagtcaaaatttgaatccgtaagtatatctactttgctttgttaaaacatcatgagagtggaggcctgccacccagaaaggcacatactagtgccttttagtacaattttatgtcatgtagaagaaaatggcaatgttcctcctattgatacagatacaggcatatgtcatcttattgcgttttgctttattgcactttgcaaataatgcattttttacaaatggaaggtttatggcaactctgcgttgagccagtctattggtgccatgtttccaataaaacttctcctttcatgtctcgtatattgtgataattcttggagtatttcatagtttttcactattattaaatctgttgtggtgatctgtggccagtgattgttgttactattgtaattgctttggaatgccatgaactgtgccctaataagacagagaacttaattgat

SEQ ID NO: 2335 - DNA, 2210 bp, Homo sapiens; identical to SEQ ID NO: 2140

SEQ ID NO: 2336 - DNA, 3087 bp, Homo sapiens
aaggaaaagctacaaacctcaaggttgttttatttaaaccaaataatctgagcaagacatatatacattaaaaacaaatgaacacattaaaatttcactattttacaatctaaattctagcaacatatacaaatactgagtgactacagtacatgccgaggtaagataagtacattctgggagaatatcactgacgctcaaaccatttttatttccaatatgtatttcaatacatgtttgtttccacttttcccagtgccacacacacacacacaaaaacaaaacaaaacaaaaaaaaacagtcacaagttggattacattagaattggtgccacagttgactttaaaagcattttaataaccacccaactcttagattttgcagtttagggacttcaagttcagaaccaaaaagcagagaatcgtttcatgtgacatgatgtttctatagacctcttgctctctaggtgacaatgcagagccagggcaaaggtgtttaagctttgtcaccttccacagctttgtggccacattcatatttagataagctcggactctgctcccctcttctggagatggggagaggcaagtgtgtatgtgttgtcatacttactgcattaattcttcactcgaaccgtttacatcagcgaataaacccattgttcaatgcaaagtgcaaacagtgaaacatgaacttaaataaactggactagacccatcacatccaacaggatctatttagatttacagcatttaataaagtataagtcagaattcacaatatcttaaactgtgctgtttcctaagatcaagtaacagccaagtcagtgtaattttatgaaacctgtaatggccacatttgttgtgtctccgatgtatttctataattgcattaacaggaaaaaacttaatccaatataccagtgactttgagtcttaaatgttgcaagcaaaggataaaaattcaagggaattttgtcagatatggttactttcacattttcagttgttacttgattgtctccaaagccgtatatgtatcagacatataaatgtagtaaaaaaaaaaaaaaaaaaaatagaaaacctctactataaaaaccaatgaactaaaaagaagtataaagcagaaaaaccatttgaatcaggctcagctcttcatctggaaagtaaagtttatataaaagtagtaaaaactagatattttataaaaattattggtagttcaaggatagcacagtggcaatatgaatcgagtcttaaaatatgcatcatttcagaaaacacttgcccctcttaaaaaaaaaaaaacccaaaactaaacaacaacaacaaaaacctccaggaaaaaacaatcaggtatacacaattaacacaagaatagcaaacttctttgggaaaatgaaatagttaccaaaaacatctctcttaaagcttcaaacaggtatattacttgaggaaaagtatattctctgtgtactaaggatgaattaaaaaatcaactggtttgctctcttcccacctgaaaagggatgactgcattaatatatgtgctttccacatccatatatgttttaataaaagtctaccatctatgtcttttgtttcaaacattttgaaacaaaatatgtattgattcttcaatgaatgaaatcacgcctcaaagtttggagaaggaaaagccagtgaaaataaggccaaaaaaccataccacaaaaggacaggaagcctgcagaaataaacagttctctttctgaagcgatgttttagaatactgatataattcatggaaacaagaaaacaaatactgttcatctttattcaaattgagtgaattctggcaacatcataatctggtggctcaggccaacagaagtgactagaactttatggaaaagtactgttcaacattaaatctacaaacaaaggtttatggaagagggaatgtcaaatttatgtatttttatcatatggtgagctgctcatgtcgtcttgacagtctgaaggctttaaaagatggttttacattgttagctaataaattacagatgatttctattttgccatgtctaaaactagctctgggcaggtatgaacaagtggtgacatggaagctgccaggaggtatcaaaaacaaggcatgaatattcatttgctagtaagctataatgtctgttccctaggtgacatataggactactcaaacctcttaccacacaaagtgcacgatcacgcagtcctgaaaaatacacgttaggtttatattttgtgtaacagtttatggaaaactgaaatgaaaaattattttttctgactaaaaatataaaataccttgagactcaagaaaaatgtatatgtttgtgaatgtataaaaccaaaaaggacaaattctggttactttttaaagaggtaatttatattacttctgagtgaataattttgcctttcactgtgataaatataagtgggtcatgtttacagtattcccttagaagccttcaacttttcataactctcctaggaaaaatcccattgcaaataaagttgggggtgggagaagaatctcctttaaagctttcaaatcataaagttgttcctgtttacacattgaggagcatacttaaaggacatgaagggatctgaattcatgagactaaggcaagcatcactcatcagaaatactcaaacattttataaacacaagaatggggcaagacaccaaagggcctcaagtggaacacgcaaggatgagaccaggccatatactgtgaagcattaaagctctaaagagtgtcacaaagtgaaaaagcaatccccctgctcattacaagtcagaaaatcccagctacagatcttaagatggataagtggatatggctgcaataaaaacaatgcttatatcactaattattaaaaaaaatccagaaaagaatataggaatagaagaggaaatcatgatagtacccatctttcacaaacagactagaatttcaagccattaggtatttcaagaacagtaccgtgcgttattgccagtcaggcttacagagccatctcgagttcattaatgtacctgcagcattggta

SEQ ID NO: 2337 - DNA, 2790 bp, Homo sapiens; identical to SEQ ID NO: 1327

SEQ ID NO: 2338 - DNA, 5628 bp, Homo sapiens
gcaggggagggcgcccgccccgctcccggcccggctgcgaggaggaggcggcggcggcgcaggaggatgtacttggtggcgggggacagggggttggccggctgcgggcacctcctggtctcgctgctggggctgctgctgctgctggcgcgctccggcacccgggcgctggtctgcctgccctgtgacgagtccaagtgcgaggagcccaggaactgcccggggagcatcgtgcagggcgtctgcggctgctgctacacgtgcgccagccagaggaacgagagctgcggcggcaccttcgggatttacggaacctgcgaccgggggctgcgttgtgtcatccgccccccgctcaatggcgactccctcaccgagtacgaagcgggcgtttgcgaagatgagaactggactgatgaccaactgcttggttttaaaccatgcaatgaaaaccttattgctggctgcaatataatcaatgggaaatgtgaatgtaacaccattcgaacctgcagcaatccctttgagtttccaagtcaggatatgtgcctttcagctttaaagagaattgaagaagagaagccagattgctccaaggcccgctgtgaagtccagttctctccacgttgtcctgaagattctgttctgatcgagggttatgctcctcctggggagtgctgtcccttacccagccgctgcgtgtgcaaccccgcaggctgtctgcgcaaagtctgccagccgggaaacctgaacatactagtgtcaaaagcctcagggaagccgggagagtgctgtgacctctatgagtgcaaaccagttttcggcgtggactgcaggactgtggaatgccctcctgttcagcagaccgcgtgtcccccggacagctatgaaactcaagtcagactaactgcagatggttgctgtactttgccaacaagatgcgagtgtctctctggcttatgtggtttccccgtgtgtgaggtgggatccactccccgcatagtctctcgtggcgatgggacacctggaaagtgctgtgatgtctttgaatgtgttaatgatacaaagccagcctgcgtatttaacaatgtggaatattatgatggagacatgtttcgaatggacaactgtcggttctgtcgatgccaagggggcgttgccatctgcttcaccgcccagtgtggtgagataaactgcgagaggtactacgtgcccgaaggagagtgctgcccagtgtgtgaagatccagtgtatccttttaataatcccgctggctgctatgccaatggcctgatccttgcccacggagaccggtggcgggaagacgactgcacattctgccagtgcgtcaacggtgaacgccactgcgttgcgaccgtctgcggacagacctgcacaaaccctgtgaaagtgcctggggagtgttgccctgtgtgcgaagaaccaaccatcatcacagttgatccacctgcatgtggggagttatcaaactgcactctgacagggaaggactgcattaatggtttcaaacgcgatcacaatggttgtcggacctgtcagtgcataaacaccgaggaactatgttcagaacgtaaacaaggctgcaccttgaactgtcccttcggtttccttactgatgcccaaaactgtgagatctgtgagtgccgcccaaggcccaagaagtgcagacccataatctgtgacaagtattgtccacttggattgctgaagaataagcacggctgtgacatctgtcgctgtaagaaatgtccagagctctcatgcagtaagatctgccccttgggtttccagcaggacagtcacggctgtcttatctgcaagtgcagagaggcctctgcttcagctgggccacccatcctgtcgggcacttgtctcaccgtggatggtcatcatcataaaaatgaggagagctggcacgatgggtgccgggaatgctactgtctcaatggacgggaaatgtgtgccctgatcacctgcccggtgcctgcctgtggcaaccccaccattcaccctggacagtgctgcccatcatgtgcagatgactttgtggtgcagaagccagagctcagtactccctccatttgccacgcccctggaggagaatactttgtggaaggagaaacgtggaacattgactcctgtactcagtgcacctgccacagcggacgggtgctgtgtgagacagaggtgtgcccaccgctgctctgccagaacccctcacgcacccaggattcctgctgcccacagtgtacagatcaaccttttcggccttccttgtcccgcaataacagcgtacctaattactgcaaaaatgatgaaggggatatattcctggcagctgagtcctggaagcctgacgtttgtaccagctgcatctgcattgatagcgtaattagctgtttctctgagtcctgcccttctgtatcctgtgaaagacctgtcttgagaaaaggccagtgttgtccctactgcatagaagacacaattccaaagaaggtggtgtgccacttcagtgggaaggcctatgccgacgaggagcggtgggaccttgacagctgcacccactgctactgcctgcagggccagaccctctgctcgaccgtcagctgcccccctctgccctgtgttgagcccatcaacgtggaaggaagttgctgcccaatgtgtccagaaatgtatgtcccagaaccaaccaatatacccattgagaagacaaaccatcgaggagaggttgacctggaggttcccctgtggcccacgcctagtgaaaatgatatcgtccatctccctagagatatgggtcacctccaggtagattacagagataacaggctgcacccaagtgaagattcttcactggactccattgcctcagttgtggttcccataattatatgcctctctattataatagcattcctattcatcaatcagaagaaacagtggataccactgctttgctggtatcgaacaccaactaagccttcttccttaaataatcagctagtatctgtggactgcaagaaaggaaccagagtccaggtggacagttcccagagaatgctaagaattgcagaaccagatgcaagattcagtggcttctacagcatgcaaaaacagaaccatctacaggcagacaatttctaccaaacagtgtgaagaaaggcaactaggatgaggtttcaaaagacggaagacgactaaatctgctctaaaaagtaaactagaatttgtgcacttgcttagtggattgtattggattgtgacttgatgtacagcgctaagaccttactgggatgggctctgtctacagcaatgtgcagaacaagcattcccacttttcctcaagataactgaccaagtgttttcttagaaccaaagtttttaaagttgctaagatatatttgcctgtaagatagctgtagagatatttggggtggggacagtgagtttggatggggaaatgggtgggagggtggtgttgggaagaaaaattggtcagcttggctcggggagaaacctggtaacataaaagcagttcagtggcccagaggttatttttttcctattgctctgaagactgcactggttgctgcaaagctcaggcctgaatgagcaggaaacaaaaaaggccttgcgacccagctgccataaccaccttagaactaccagacgagcacatcagaaccctttgacagccatcccaggtctaaagccacaagtttcttttctatacagtcacaactgcagtaggcagtgaggaagccagagaaatgcgatagcggcatttctctaaagcgggttattaaggatatatacagttacactttttgctgcttttattttcttccaagccaatcaatcagccagttcctagcagagtcagcacatgaacaagatctaagtcatttcttgatgtgagcactggagcttttttttttttacaacgtgacaggaagaggagggagagggtgacgaacaccaggcatttccaggggctatatttcactgtttgttgttgctttgttctgttatattgttggttgttcatagtttttgttgaagctctagcttaagaagaaactttttttaaaaagactgtttggggattctttttccttattatatactgattctacaaaatagaaactacttcattttaattgtatattattcaagcacctttgttgaagctcaaaaaaaatgatgcctctttaaactttagcaattataggagtatttatgtaactatcttatgcttcaaaaaacaaaagtatttgtgtgcatgtgtatataatatatatatatacatatatatttatacacatacaatttatgttttcctgttgaatgtatttttatgagattttaaccagaacaaaggcagataaacaggcattccatagcagtgcttttgatcacttacaaattttttgaataacacaaaatctcattctacctgcagtttaattggaaagatgtgtgtgtgagagtatgtatgtgtgtgtgtgtgtgtgtgtgtgtgcgcgcgcacgcacgccttgagcagtcagcattgcacctgctatggagaagggtattcctttattaaaatcttcctcatttggatttgctttcagttggttttcaatttgctcactggccagagacattgatggcagttcttatctgcatcactaatcagctcctggattttttttttttttttttcaaacaatggtttgaaacaactactggaatattgtccacaataagctggaagtttgttgtagtatgcctcaaatataactgactgtatactatagtggtaacttttcaaacagcccttagcacttttatactaattaacccatttgtgcattgagttttcttttaaaaatgcttgttgtgaaagacacagatacccagtatgcttaacgtgaaaagaaaatgtgttctgttttgtaaaggaactttcaagtattgttgtaaatacttggacagaggttgctgaactttaaaaaaaattaatttattattataatgacctaatttattaatctgaagattaaccatttttttgtcttagaatatcaaaaagaaaaagaaaaaggtgttctagctgtttgcatcaaaggaaaaaaagatttattatcaaggggcaatatttttatcttttccaaaataaatttgttaatgatacattacaaaaatagattgacatcagcctgattagtataaattttgttggtaattaatccattcctggcataaaaagtctttatcaaaaaaaattgtagatgcttgctttttgttttttcaatcatggccatattatgaaaatactaacaggatataggacaaggtgtaaatttttttattattattttaaagatatgatttatcctgagtgctgtatctattactcttttactttggttcctgttgtgctcttgtaaaagaaaaatataatttcctgaagaataaaatagatatatggcacttggagtgcatcatagttctacagtttgtttttgttttcttcaaaaaagctgtaagagaattatctgcaacttgattcttggcaggaaataaacattttgagttgaaatcaaaaaaaaaaaaaaaaaa

SEQ ID NO: 2339 - DNA, 414 bp, Homo sapiens
ttttttttttggggacaggaatttgacttttattctttcccatattcccagtgcctgacagatggaaggtacctaatagatatttgtagaatggctgaatgagggtgcaagacaccataatgccttccaattatctttcttttgccttgctattttcattttaaagtggcagatggatggggacacagtaggaattatctagattatggccatcagccactttcaataatcttttggttcttgttctaattcattaaattgctgtgcagccaacttgaattacacagcaagacacagcaaagagaatcagaagccaattcttctaacacgtatctcttcttaaacaaggaaattccacacagcaccatttcttaggcaaggcagataacccctacatatttggtttttctttaa

SEQ ID NO: 2340 - DNA, 5234 bp, Homo sapiens; identical to SEQ ID NO: 41

SEQ ID NO: 2341 - DNA, 7606 bp, Homo sapiens
aagaatcagaagacatttgtgctttggggagcagaggccctcagggtatagagaaggaagaagagagaggttcactgtagtcctgaagcagaaataagacctgtggctgaaggaagccttagcaattcactccttcctcttcctgagaactctctgtaggaagtctcacctagcagaggcttcacagtatttcagagaagccaaagattgtttgcctctttggaaactgttatccttccatcatgactgtgtcactcctgccactgttccaccatagagatggcgtcctttgcagcaaaccgtaagttataaggatgagggaagaagagtagagggccaaaaggattccattttgaggaaaaactacagtttgccttgccaggtagaagaatcaggcgcccagacaccatgtcacaaccctccagaactgacgttggcaggaagtagagactttgttgcctgtgtcccccatcctcaccatgtcttcgactcagggcaatggggaacactggaagtccctggagtcagtgggcatcagccgcaaagagctagcgatggccgaagccctgcagatggagtatgatgccctgtcccggctccggcatgacaaggaggagaacagagccaagcagaacgcagacccctctctcatcagctgggatgagcctggggtagacttttacagcaagccagcaggaaggcggaccgacctcaagctgttacgcggtctctctggctctgatcctacccttaactacaactcactctccccacaggaagggccgcccaaccactctacctcccaagggccacagcctggctcagatccctggcccaaaggctccctgtctggagactatctctacatttttgatggttcagatgggggagtctcttcgtccccaggaccaggggacatagagggctcttgcaagaaactatccccacctcctctgcctccccgagcttctatctgggatacccctcccctgcctcccagaaaggggtccccctcatcctccaagatctcccagcccagtgacatcaacactttctctttggtcgaacaattgccgggcaaactgctagagcatcggatcctagaagaggaagaggtgctgggaggtgggggtcaggggcgcctactggggtctgtggactatgatggtatcaatgatgcaattactaggctcaacttgaaatcgacctatgatgcggagatgttgcgggatgccaccaggggctggaaggagggccgagggccgctggacttcagcaaagacacctctggaaaacccgtggccaggagcaagactatgccccctcaggtgcccccccgcacctatgcctcccgctatggcaaccgaaagaatgcgacgcctggcaagaaccgccggatttctgcagccccggtgggctcccggccccacactgttgccaatggccatgagttgtttgaggtctcagaagagagagatgaggaggttgctgcattttgccacatgctggatatccttcgatctggctctgacatccaagactacttcctcactggctatgtctggagtgctgtcacccctagcccagagcacctcggggatgaggtcaacctgaaggtgactgtgttgtgtgacaggcttcaagaggcactcactttcacctgcaactgttcctccactgtagacttgcttatctaccagaccctgtgctacacccatgatgacctgaggaatgtggacgtgggtgactttgtgctaaagccctgcgggctggaggagttcctgcagaacaagcatgccttgggcagtcatgagtacatccaatactgccgcaagtttgacattgacattcggctacagctgatggagcagaaggttgtgcgcagtgacctggcccggacggtgaatgatgaccagagcccctccaccttgaactacctcgtccatctccaagagaggcctgtcaagcagaccatcagcaggcaggccctgagtcttctgttcgacacttaccacaatgaggtggatgccttcctgctggctgatggagacttcccactgaaggctgacagggtggtccagtccgtcaaggccatctgcaacgccctggccgccgtggaaacccctgagatcaccagtgctctcaaccagctgcccccctgcccctcccgcatgcagcctaaaattcagaaggatcccagtgtcttggctgtgagggaaaaccgagagaaggtcgtggaagccctgaccgctgccatcttggacctggtggagctgtactgcaacacattcaacgcagacttccagacggcagtgcccgggagccgcaagcatgacctggtccaggaggcctgccatttcgccaggtccctggccttcactgtctatgccacccaccgcatccccatcatctgggctaccagctatgaagatttctacctctcctgctccctcagccatggcggcaaggagctgtgcagccccctgcagacccgaagagctcacttctccaagtacctcttccacctcatcgtctgggaccagcagatctgcttcccagtgcaggtgaaccggctgcctcgggagacactgctgtgtgccactctctatgctctgcccatccccccaccggggagctcctcagaggccaataagcagcggcgggtgcctgaagccctgggctgggtcactaccccactcttcaacttcaggcaggtcctgacctgtggccggaagcttctgggtttgtggccagcaacacaggaaaatcccagcgcccgttggagtgcacctaatttccaccagccagacagtgtcatcctgcagattgacttccccacctcggcctttgacatcaagttcaccagcccccctggagacaagttcagcccccgctatgagtttggcagcctccgggaagaagaccagcgcaagcttaaagacatcatgcagaaagagtccttgtactggctcactgatgctgacaagaagcgcctgtgggagaagcgatattactgccactcggaggtgagctcgctccccctggtgctcgccagcgcccccagctgggagtgggcttgcctgcctgacatctatgttctcctgaagcagtggacccacatgaaccaccaggatgccctggggctcctgcatgccaccttcccggaccaggaggtgcgtcgtatggctgtgcagtggattggctcactctcagatgctgagctgctagactacctgccccagctggtacaggccctgaagtatgaatgctacctggacagcccgttggtgcgcttcctcctgaaacgagctgtgtctgacttgagagtgactcactacttcttctggttactgaaggacggcctcaaggactctcagttcagcatccgctaccagtatctgctggcagccttactgtgctgctgtggcaaggggctgagagaagagtttaaccgccagtgctggcttgtcaatgccctggccaaactggcccagcaggtccgggaggcagccccatctgcaaggcagggaatcctccgcacgggcctggaggaggtgaagcagttctttgccctcaatggctcgtgccgcttgccactcagccccagtctgctggttaagggaattgtgcccagggactgttcctacttcaactccaatgctgtccccctcaaactctccttccaaaatgtggatcccctgggtgagaacatccgtgtcatcttcaagtgtggggacgaccttcgccaggacatgctaacgctgcagatgattcgcatcatgagcaagatctgggtccaggaggggctggacatgcgcatggtcatcttccgctgcttctccaccggccggggcagagggatggtggagatgatccctaatgctgagaccctgcgtaagatccaggtggagcatggggtgaccggctcgttcaaggaccggcccctggcagactggctgcagaaacacaaccctggggaggacgagtatgagaaggctgtggagaactttatctactcctgcgctggctgctgcgtggccacgtacgtcttgggcatctgtgaccgacataatgacaacatcatgctgaagaccactggtcacatgttccacattgattttggccgcttcctgggccatgcccagatgtttggcaacatcaagcgggaccgtgccccctttgtcttcacctcggacatggcgtatgtcatcaacgggggtgacaagccttccagccgcttccatgattttgttgacctttgctgccaagcctacaacctcattcgcaagcacacccacctcttcctcaaccttctgggcctgatgttgtcctgtgggatccctgaactctcagacctggaggacctcaagtatgtgtacgatgccctgaggcctcaggatacagaggccaatgccactacctacttcactaggttgattgagtccagcctgggcagtgtagccacaaagctcaattttttcatccataatctggctcagatgaagttcacgggctcagatgaccggctgaccctctcctttgcctcccgaacacacactctcaagagctctggccgaatcagtgatgttttcctctgccgccatgagaagatcttccaccccaacaaaggctatatatatgtggtaaaggtgatgcgagagaacactcacgaggccacctacatccagcggacctttgaggagttccaggaattacacaataagttgcggctgctcttcccttcttcccacttgcccagcttccctagtcgcttcgtgatcggccgctcccggggagaggcggtggccgagcggcggagggaggagctaaacggttacatctggcacttgatccacgcaccccctgaggtggccgagtgtgatttggtgtacaccttcttccacccactgccccgggatgagaaggctatgggcaccagcccagctcctaagtcctcagatggcacatgggcccggcccgtcggaaaggtgggaggggaggtgaagctgtccatctcctacaaaaacaataaactcttcatcatggtgatgcatattcggggcttgcaactgctccaggatggaaatgaccctgacccctatgtgaaaatttacctccttcctgaccctcagaaaaccactaagaggaaaaccaaagtggcccggaaaacctgcaatcctacctacaatgagatgttggtatatgatgggatccccaagggtgacctgcagcagcgggagctccagctgagcgtgctgagtgagcagggattctgggagaacgtcctcctcggtgaggtgaacatccgcctgcgagagctggacctggctcaggagaagaccggctggttcgccctgggatctcgaagtcatggcaccttgtgagcccagcagagccaccacccagcatcccaggctggtggcaggagctgggggagaggactctcccctgtgagactcctccttgtgaagggccagggccctgggcaggcctccagctcggtccaggtgattctggcctctgtggtaggaggcagggagagtaagacatgctctgctgtctcttcctctggagactgaacttgggttggttgtgatgagcagccccttggaggctgtgaggttgcagcaaagttttaagtttaccttgtgtcaagggagcaatgcttggtttggggagtgtgtggggtgggctgtatgaagtagcattttgggggtgggtgggtggatatcttaatttttatttttaaaaaatgaaatagtgatgttgtcctaactgggacaggaagccttgcgagaagggacgtacctatgccccagaaggcaagagaggaagactatttggactttttgtatgattaaggttcttattggacttttccctaggttttttttttttgttattgttgttgttgtttcgttttctagctataggaactatctggggaggggcccagtgggtcctcggccagagccctctctaaggacaggttggggagggttggggagggctgcctgtgctggactgaggcttgtgccactgggcctttctgattttgcctccaaaggagagcgctgtgatacctacatgtgtaaggaagggccttccgtattggggttctgccaaggacccgtattcagggacccatgctcttttggggggacttttcctcttgtcttccctactttattaggacttgccctgaataccattttctaccccttgcccctccattctcctggcccttctgggggtcagctggtctctatgaatatgctgggggtgcttccccataggtctctcccttcatttgtctctggtgggacaaaatactgactcagtccttagatgtagtttcacccaagagcatcttggccctgggaagaggtccctaggctgcagatgctactgactgcttgctaggtagcctctggaaagcattccccatccatcactccccacttctttctgctgtgctgcttccctcccaaactccatttctgtcaccctttttataagacttttcctcattctgtggggccataaacctatttagtctggagccaaagggatgccctatctgaaggaaaggggcatggggtgggggattccatcaaaactgttgttttttgccccatgatttttctttggtcagtaggaggctggattggagtggtgattattcccctggagctaagctcaggagcccgaagggagagactgagactgactcccttatctcttcatattctttattccctaccagatggatttttttttttttttttggagacggagtctcgccctgtcgccaggctggagtgtagtggcatgatctcgactcactgcaaaatctgcctcccgggttcaagcgattctcctacctcagcctcccgagtagctgggattacaggcatgtgccaccacgccaagctaatttttgtatttttagtagagacggggtttcaccatgttggccaggatggtctcgatctcttgacctcgtgatctgcctgccttggcctcccaaagtgctgggattacaggcgtgagccaccatgccccgccccagatggattttacatttgctcttttgtgtttcgctccaaagggttgtcttcctcgccaaaaggagggagggactttgaatttgatatgaatctttaaaaccagaattggctggatatttcccatgattgggaaaagagtgaaatgaggacattctgtaaactgtccctccctaattccaaggatcagaaactccccgttttgctgactcattccataactggagaaagaagctccattgaccgaagccacagggcagcatggaagtttaaattttctctaaaattaaaatgccaaggataaagctggctgcttccaggagggggaagaggagtggggagtgggcggtgaaacttttccagatgaacggaccataaatgtgttactggctttgtgcctgtagctcattttattatgacctatatgctcctgatttaaagagatctgtgtactgtttacttcccacttcccagaatcccttgtatctcctttctcgggaattgtattttctaataaatgacatttgagaaaaaaatga

SEQ ID NO: 2342 - DNA, 4698 bp, Homo sapiens
cttgcgcactgagaactcacaccatatgtgtcctgttccagtgcgcgggtctgtggagagccgggtgcgagcggcggcagcacgaggggaaaagagctgagcggagaccaaagtcagccgggagacagtgggtctgtgagagaccgaatagaggggctggggccacgagcgccattgacaagcaatggggaagaaacagaaaaacaagagcgaagacagcaccaaggatgacattgatcttgatgccttggctgcagaaatagaaggagctggtgctgccaaagaacaggagcctcaaaagtcaaaagggaaaaagaaaaaagagaaaaaaaagcaggactttgatgaagatgatatcctgaaagaactggaagaattgtctttggaagctcaaggcatcaaagctgacagagaaactgttgcagtgaagccaacagaaaacaatgaagaggaattcacctcaaaagataaaaaaaagaaaggacagaagggcaaaaaacagagttttgatgataatgatagcgaagaattggaagataaagattcaaaatcaaaaaagactgcaaaaccgaaagtggaaatgtactctgggagtgatgatgatgatgattttaacaaacttcctaaaaaagctaaagggaaagctcaaaaatcaaataagaagtgggatgggtcagaggaggatgaggataacagtaaaaaaattaaagagcgttcaagaataaattcttctggtgaaagtggtgatgaatcagatgaatttttgcaatctagaaaaggacagaaaaaaaatcagaaaaacaagccaggtcctaacatagaaagtgggaatgaagatgatgacgcctccttcaaaattaagacagtggcccaaaagaaggcagaaaagaaggagcgcgagagaaaaaagcgagatgaagaaaaagcgaaactgcggaagctgaaagaaaaagaagagttagaaacaggtaaaaaggatcagagtaaacaaaaggaatctcaaaggaaatttgaagaagaaactgtaaaatccaaagtgactgttgatactggagtaattcctgcctctgaagagaaagcagagactcccacagctgcagaagatgacaatgaaggagacaaaaagaagaaagataagaagaaaaagaaaggagaaaaggaagaaaaagagaaagagaagaaaaaaggacctagcaaagccactgttaaagctatgcaagaagctctggctaagcttaaagaggaagaagaaagacagaagagagaagaggaagaacgtataaaacggcttgaagaattagaagccaagcgtaaagaagaggaacgattggaacaagaaaaaagagaaaggaaaaagcaaaaagaaaaagaaagaaaagaacgcttgaaaaaagaagggaaacttttaactaaatcccagagagaagccagagccagagccgaagctactcttaaactgctacaagctcagggtgttgaagtgccatcaaaagactctttgccaaagaagaggccaatttatgaagataaaaagaggaaaaaaataccacagcagctagaaagtaaagaagtgtctgaatcaatggaattatgtgctgctgtagaagttatggaacaaggagtaccagaaaaggaagagacaccacctcctgttgaaccagaagaagaagaagatactgaggatgctggattggatgattgggaagctatggccagtgatgaggagacagaaaaagtagaaggaaacaaagttcatatagaagtaaaagaaaaccctgaagaggaggaggaggaggaagaagaggaagaagaagatgaagaaagtgaagaagaggaggaagaggagggagaaagtgaaggcagtgaaggtgatgaggaagatgaaaaggtgtcagatgagaaggattcagggaagacattagataaaaagccaagtaaagaaatgagctcagattctgaatatgactctgatgatgatcggactaaagaagaaagggcttatgacaaagcaaaacggaggattgagaaacggcgacttgaacatagtaaaaatgtaaacaccgaaaagctaagagcccctattatctgcgtacttgggcatgtggacacagggaagacaaaaattctagataagctccgtcacacacatgtacaagatggtgaagcaggtggtatcacacaacaaattggggccaccaatgttcctcttgaagctattaatgaacagactaagatgattaaaaattttgatagagagaatgtacggattccaggaatgctaattattgatactcctgggcatgaatctttcagtaatctgagaaatagaggaagctctctttgtgacattgccattttagttgttgatattatgcatggtttggagccccagacaattgagtctatcaaccttctcaaatctaaaaaatgtcccttcattgttgcactcaataagattgataggttatatgattggaaaaagagtcctgactctgatgtggctgctactttaaagaagcagaaaaagaatacaaaagatgaatttgaggagcgagcaaaggctattattgtagaatttgcacagcagggtttgaatgctgctttgttttatgagaataaagatccccgcacttttgtgtctttggtacctacctctgcacatactggtgatggcatgggaagtctgatctaccttcttgtagagttaactcagaccatgttgagcaagagacttgcacactgtgaagagctgagagcacaggtgatggaggttaaagctctcccggggatgggcaccactatagatgtcatcttgatcaatgggcgtttgaaggaaggagatacaatcattgttcctggagtagaagggcccattgtaactcagattcgaggcctcctgttacctcctcctatgaaggaattacgagtgaagaaccagtatgaaaagcataaagaagtagaagcagctcagggggtaaagattcttggaaaagacctggagaaaacattggctggtttacccctccttgtggcttataaagaagatgaaatccctgttcttaaagatgaattgatccatgagttaaagcagacactaaatgctatcaaattagaagaaaaaggagtctatgtccaggcatctacactgggttctttggaagctctactggaatttctgaaaacatcagaagtgccctatgcaggaattaacattggcccagtgcataaaaaagatgttatgaaggcttcagtgatgttggaacatgaccctcagtatgcagtaattttggccttcgatgtgagaattgaacgagatgcacaagaaatggctgatagtttaggagttagaatttttagtgcagaaattatttatcatttatttgatgcctttacaaaatatagacaagactacaagaaacagaaacaagaagaatttaagcacatagcagtatttccctgcaagataaaaatcctccctcagtacatttttaattctcgagatccgatagtgatgggggtgacggtggaagcaggtcaggtgaaacaggggacacccatgtgtgtcccaagcaaaaattttgttgacatcggaatagtaacaagtattgaaataaaccataaacaagtggatgttgcaaaaaaaggacaagaagtttgtgtaaaaatagaacctatccctggtgagtcacccaaaatgtttggaagacattttgaagctacagatattcttgttagtaagatcagccggcagtccattgatgcactcaaagactggttcagagatgaaatgcagaagagtgactggcagcttattgtggagctgaagaaagtatttgaaatcatctaattttttcacatggagcaggaactggagtaaatgcaatactgtgttgtaatatcccaacaaaaatcagacaaaaaatggaacagacgtatttggacactgatggacttaagtatggaaggaagaaaaataggtgtataaaatgttttccatgagaaaccaagaaacttacactggtttgacagtggtcagttacatgtccccacagttccaatgtgcctgttcactcacctctcccttccccaacccttctctacttggctgctgttttaaagtttgcccttccccaaatttggatttttattacagatctaaagctctttcgattttatactgattaaatcagtactgcagtatttgattaaccaagcttctgcagattttgtgattcttgggacttttttgacgtaagaaatacttctttatttatgcatattcttcccacagtgatttttccagcattcttctgccatatgcctttagggcttttataaaatagaaaattaggcattctgatatttctttagctgctttgtgtgaaaccatggtgtaaaagcacagctggctgctttttactgcttgtgtagtcacgagtccattgtaatcatcacaattctaaaccaaactaccaataaagaaaacagacatccaccagtaagcaagctctgttaggcttccatgttagtgtagcttctctcccacaagttgtcctcctaggacaagaattatcttacaaactaaactatcatcacactaccttgtatgccagcacctggtaacagtagagatttttatacattaatcttgatctgttttaatcttgatctgttttagtagagatttttatacattaa

SEQ ID NO: 2343 - DNA, 2263 bp, Homo sapiens; identical to SEQ ID NO: 2320

SEQ ID NO: 2344 - DNA, 3227 bp, Homo sapiens
ggttccggttgctgccgccgctggcgggcggcgagtctggagagagcgcgcagtttgcgcggcggctcggcgcttccctgtcgtcgcactttgtggttgctgcagctcgggggcctgggctgcccctgacaccccttctgggcgatggtgcagcccaagggcgcctccatcccccgccgctgccgctaacccgggtcccccactccatggccgcctcggcgccgcccccaccggacaagctggagggaggtggcggccccgcaccgccccctgcgccgcccagcaccgggaggaagcagggcaaggccggtctgcaaatgaagagtccagaaaagaagcgaaggaagtcaaatactcagggccctgcatactcacatctgacggagtttgcaccacccccaactcccatggtggatcacctggttgcatccaacccttttgaagatgacttcggagcccccaaagtgggggttgcagcccctccattccttggcagtcctgtgcccttcggaggcttccgtgtgcaggggggcatggcgggccaggtacccccaggctacagcactggaggtggagggggcccccagccactccgtcgacagccaccccccttccctcccaatcctatgggccctgctttcaacatgcccccccagggtcctggctacccacccccaggcaacatgaactttcccagccaacccttcaaccagcctctgggtcaaaactttagtcctcccagtgggcagatgatgccgggcccagtggggggatttggtcccatgatctcacccaccatgggacagcctcccagagcagagctgggcccaccttctctgtcccaacgatttgctcagccaggggctccttttggcccttctcctctccagagacctggtcaggggctccccagcctgccgcctaacacaagtccctttcctggtccggaccctggctttcctggccctggtggtgaggatggggggaagcccttgaatccacctgcttctactgcttttccccaggagccccactcaggctccccggctgctgctgttaatgggaaccagcccagtttccccccgaacagcagtgggcggggtgggggcactccagatgccaacagcttggcaccccctggcaaggcaggtgggggctccgggccccagcctcccccaggcttggtgtacccatgtggtgcctgtcggagtgaggtgaacgatgaccaggatgccattctgtgtgaggcctcctgccagaaatggttccaccgtgagtgcacaggcatgactgagagcgcctatgggctgctgaccactgaagcttctgccgtctgggcctgcgatctctgcctcaagaccaaggagatccagtctgtctacatccgtgagggcatggggcagctggtggctgctaacgatgggtgacgctggtgaagtggcccagggaagtgcacatgtctctccctgctcttccagggtgatttttttgatgtttggctcttggtccttgtttccactggctttccatccccatggggcagaaacagtggctcctgggagcagaaaaggaattgaggtgggcaggcagaagagcctggattgctcactgttttgggaaacttacatgttgagatctacagagatccaggaaaccaaagccctgctgagcagagccattttgtggctatttctggaggcccaggagtgtggctgcaagagaaaaggggctggaggaagatccggagggcaggggtgttccctctgctgatgatggatgcccctaacacctgtgcctaacacccctactgaaccccacagctccagccttagtttttggagtcaagtgttaaaggtttctggccagaggaattggggtcttgccatccctgcaatagcccttttatgggctctgggagacagctttagggaataaatggggattttcccctttttctacccactcctttgcttcctccaagacttacccaactccttccccctcagagaaccaaatagcctgaggaagcaggagagttcctggttatggcagtttcttggtgatttggggcttcaagacagtaggtgagagatgctgtcaggacgtatcttcttcataccaaagtcactggtcctttctcagcctctctcgtgcttttctcctaatgaccatatttttgccaaaaattgggatatgttatctgacagaccagaatatttgaagtttgggctgtcctgaaagtctggactttggtggtaccctcctcccccagcccatctgttgcacattatactccgtgtgttcttcaactttcggcgcccttattcccctgccttcctggcttgattgaaggaaagcttgaaaaggcgcagagccctatacctcatttcctccatgataaaaggatccaagtgaggccctgtcacagcctgtgggtaggggatgcggcgggatcctcattgccatggtactcaaaggtagaagagcctggagtttgttgcttctctttgctattctttcatatcctcttgggcctggtgattaattagcaattctcattcctctcagccaaaggcctgcactgggctttatttgtctttttttattttttaagcactgcctgccagagatgggcctggggcctgatgaggaccttagcgctgctcgttctccttttctgttcatgcacacattcctccatggggtggggaaggcaggcatggggtgtggccctcggagaagttaggagtcccccagctcaagatacagtggcaaagacctagtggtcccctacccccacttctctcagttcctggcatgaggagagaagaccctgctctggtggagctgacaacctttgaggctgggaggagagcagcctctgggcatcgttcccagtgtccctcacactaaaacggcgtagatggcaaccccccacccccaccccgctgctcaactcttgtgtttgttgttctgtttgccccatttatctgttgctgtttttgtgttgtcttcccctgctccgcattttgtaaaatggcccctgggggagtgtttttgctggatctgctccctctcgctctctcactccactactttttggaacaaagtgatggcagaatgcggtggtggtgggggtcttttgtactgttggattaataaaatgattttaaaatcccaaaaaaaaaaaaaaaaaaaaaaaaaaaaaaaaaaaaaaaaaaaaaaaa

SEQ ID NO: 2345 - DNA, 4105 bp, Homo sapiens
ttccggccggcttccgcagacggcgctggtggtcgatcgtgtggcgccggaggacgttccccgcggccggagccatggagatgccgctgccccccgatgaccaggagcttcgaaatgtcatcgacaagctcgcccagttcgtggctcgcaatgggcccgagtttgagaagatgactatggagaagcagaaggacaaccccaaattctcgtttcttttcggaggcgaattctacagttactacaagtgcaagctggcgctggagcagcagcagctcatctgcaagcagcagaccccggagctggagccagccgccaccatgccacccctgccacagcccccgctggcccccgccgcgcccatcccgccggcccagggcgcgccatccatggacgagctcatccagcagagccagtggaacctccagcagcaggagcagcacttgctggcgctcagacaggagcaagtgacagcggccgtggcccacgcggtggagcagcagatgcagaagcttctggaggagacccagctagacatgaacgagtttgacaacctcctgcagcccatcatcgacacgtgcaccaaggacgccatctcggccgggaagaactggatgttcagcaatgccaagtccccgccgcactgtgagctgatggccggccacctccggaaccgcatcacggctgatggggcacacttcgagctgcggctgcacctcatctacctgatcaatgacgtgctgcaccactgccagcgcaagcaggcccgggagctgctggccgccctgcagaaggtcgtggtgcccatctactgcaccagcttcttggccgtggaggaagacaagcagcagaagatcgcccggctcctgcagctctgggagaaaaacggctacttcgatgactccatcattcagcagctacagagcccagccctggggcttggtcagtaccaggccaccctcatcaacgagtactcctcagtggtccagccggtgcagctggccttccagcagcagatccagaccctcaagacgcagcacgaggagtttgtcaccagcctggcccagcagcagcagcagcagcaacagcagcagcagcagctccagatgccgcagatggaggctgaagtcaaggccacgcctccaccgcctgctccacccccggccccagcacctgcccctgccatcccgcccaccacccagcctgatgacagcaagcctcccatccagatgcctggctcttcagagtacgaagctccaggaggggtccaggatcctgcagctgccggcccccggggccccgggccacacgaccagatcccaccaaacaagcccccttggtttgaccagcctcaccccgtggctccttggggccagcagcagccgccagagcagccaccctacccgcaccaccagggcggcccaccccactgccccccctggaacaacagccatgagggcatgtggggcgagcagcgcggtgaccccggctggaacggccagcgcgacgcgccctggaacaaccagcccgacgccgcctggaacagccagttcgagggcccctggaacagccagcacgagcagccgccctggggcgggggccagcgcgagccacccttccgcatgcagcggcccccacacttccgggggcccttcccgccccaccagcagcacccgcagttcaaccagcctccgcacccccacaacttcaaccgcttcccgccccgcttcatgcaggacgacttcccgccacggcaccccttcgagcggccgccctatccccaccgcttcgactacccccagggggacttccctgccgaaatggggccccctcaccaccaccctggccaccgcatgcctcatcctggcatcaacgagcacccgccttgggctggaccccagcaccctgacttcggccctcccccccatggcttcaacgggcagcccccacacatgcggcgacagggcccaccccacatcaaccacgatgaccccagcctggtccccaatgtgccctacttcgatctccctgctgggctgatggcccccctcgtgaagctggaagatcacgagtacaagcctttggaccctaaagacatccgcctcccaccccccatgccgcccagcgagaggctgctggctgcagtggaggccttctacagccccccgtcccacgacaggcccaggaacagtgaaggctgggagcagaacggcctctatgagttcttccgagcaaaaatgcgggcccggcggaggaaaggccaggagaagaggaacagcggaccctcgaggtctcggagcagatccaagagtcgagggcgttcttcctcccgctccaactcaagatcctccaagtcttcaggctcgtactcaaggtcaaggtcgcgctcctgctcccgttcctactcccgctccagatctagaagtcggagcaggtcgcgctcctccagaagccgctcccggtcccagtcgcggtcccggtccaagtcgtactccccaggaagaagacgccggtcacggtccaggagccccaccccgccttcctctgctggtctgggttctaattcggcgcctcccatccctgactcaaggctcggagaagagaacaaaggccatcagatgctggtgaagatgggctggagcggctcaggcggcctcggtgcgaaggagcaagggatccaggaccccatcaagggcggggacgtccgggataagtgggaccagtataaaggcgtgggcgtggctctggatgacccctatgagaactaccgcaggaacaagagctactccttcatcgcccgcatgaaggccagggacgagtgtaagtaggcgcccatgccgggagccgcgccggtggccagcggtgccggctgtgggaccttcctggctgactggcagaggaagattgcagtgacagctcagttcttacaccgtctccacttgtggagagccacaggaagagaaggaagaccagcgcatgcccagtgggaacgccgtgctccatggcgtggagggcacgggtgccacccacaaaccacaccaggaggcgctgcagccaccagggccccaggctcgttttcctttatagcgaagcaaaaaacacaagaccctccgcccgagtaaattcttcagccacgaagggatggatgtgcatctgccctaagtcagattgaagcctcctcctaggctccaggaggagcatgtgcaggaagggttggcctgagccagagccggcaccccagctccttcctccagctccccgcacccaccggccctgacctggcttcccctcggctgtgtagggacaaagccgaagcccagtgccatgactgcccgcggattgaaaaacagaaacacaaaactttgacttgacttgcgaagtgaagcagggttttcatttttactctccttggtttaggtctagaaagaagaatactgacctgagaggaggcccagtgagattctgaaacctaattcttcgaaggcgtactggcccttagttcagttattttagttgtataagttgatattttttttctggaatgtagccatttgctgttatctgggaaacaagattctaacaggaaaccagcctaagacacttcaggttgagcgctgcctcggagtctgtgcccgtcgcgtcccctgcttgagttttgcacttggaagaaccctgcaccggctggcgtgtgcgacggcccagtcccatccagagcatggagcccgaccccagccagcgccttccactccatcatttcatttcacacccccgaagggaggggaggccaggaggggagctgctcctgccagaagctggtgggtgaccgttgggaatcggccacacctggtgtccatgggcagcctggtgcaattccattcatttgtacagaaacatttttgaaaaattcttttcaataagatgcaaaatcttccaacttttcaacccaacgtgatgaatatttgattttgttctagatttcctgtagctgtgaattgttaaaatgtatgattcaggataaaacgtaaacacgtgctgttagtaatttcttgtggatttcattgttttgccttcaaataaagcctttttttaaagacctttaaaaaaaaaa

SEQ ID NO: 2346 - DNA, 1977 bp, Homo sapiens; identical to SEQ ID NO: 1828

SEQ ID NO: 2347 - DNA, 1940 bp, Homo sapiens
aagtgtggcaggaggaaggctgtatgatataaaggaagaaagcatgcatctggaactcagaacttgacggcattactgttacgggaggccctgaagtctgagccagggccatggaggcctctgtgctgagccccacatcctgggagaaacggcgggcctggctccgtcagagccgtaactggcagacccaggtcctagaagaggaggctgccgccgccctgcaggatgtcccagatcctgagccttccagcctggatgacgttttccaagaagggaatccaatcaataaaattgaagactggctgcaggattgcggatactctgaagaaggattttctgaggaagcaggacagtttatctacaatggcttctgcagccatgggaccagctttgaagatgacttgaccctgggagcggaggccacactactggccgccaatggcaaactcttctccaggagtttcctcgagacagccaggccttgccagctacttgatcttggctgtagtttggcttccagcagcatgactggggggaccaacaagactagttcaagcatctcagaaattctggacaaagtgcaagaagatgcagaagatgtcctcttcagtctgggctttggccaagaggatcacaaagacacttctcggatacccgcccgatttttcaccaccccctctcaggccaagggcattgatttccagctcttcctgaagtcccaggtgcggaggattgaaatggaagacccctgcctcatgctggccagcaggtttaagcaggtgcaaacactggctgtcactgctgatgccttcttctgtctctactcctatgtgtctaagacacctgtccaaaagttcacaccatcccacatgttctggaattgcaaccatccaactgatgtgccatccatcaggattctgtcccgagagcctgaaccccagtcacccagagaccgccttcggaaagccatctccaagatgtgtctgtacacatgcccccgagaccggccaccaccaccccacaacacccccaaaaggaacagtttggaccaagttgtgttggaagtgatggacaaagtgaaagaagagaagcagttcctccagcaagactctgatttggggcaattctcacaggaagatcctgtgccccctgctgagggtaagaagttgcccacttctccctatccatgtgtcttctgctgtgaagaggaaacacagcagaggatgtccacagtgctagcaccatcccaaactctggattcgaaccccaaggtaccctgttgcacacattctctgcccatagaagatccacagtggagcacagacccagctcagataaggagagagctgtgtagtctaccagccaccaatacggaaacccatccagccaaggatgagactttctggaaaagaaagagcagagcaagaaagagcctcttccagaagaatctcatgggcaggaaggttaagtccttggacctgtccatcacccagcagaaatggaagcagagtgtagacagaccagaactgcgtcggtctttaagccagcagccacaggacacttttgacttggaggaggtgcaaagcaacagtgaggaggagcagagtcagagtcgctggcccagcagacccaggcacccccaccaccaccagacttttgctggcaaagactcgtgaagctttctccaccaccacaacagcatgtggtctgacagaattggcttcaaagaagaaactaaaagccacctcttgcaggaaactgcactgccctcaacatccagcccctactccttggtcctccaaacccccaaactctgcaggagaaaggcagcatggtacatggggaggaagaccagactgagcgatttggaatccacatcctaatgctgccacaagctgcatgcacaaagaccttaggcacatcaaaaaaaaaaaaaaaaa

SEQ ID NO: 2348 - DNA, 6927 bp, Homo sapiens
ggggggagggtggcggctcgatgggggagccgcctccagggggcccccccgccctgtgcccacggcgcggcccctttaagaggcccgcctggctccgtcatccgcgccgcggccacctccccccggccctccccttcctgcggcgcagagtgcgggccgggcgggagtgcggcgagagccggctggctgagcttagcgtccgaggaggcggcggcggcggcggcggcacggcggcggcggggctgtggggcggtgcggaagcgagaggcgaggagcgcgcgggccgtggccagagtctggcggcggcctggcggagcggagagcagcgcccgcgcctcgccgtgcggaggagccccgcacacaatagcggcgcgcgcagcccgcgcccttccccccggcgcgccccgccccgcgcgccgagcgccccgctccgcctcacctgccaccagggagtgggcgggcattgttcgccgccgccgccgccgcgcgggccatgggggccgcccggcgcccggggccgggctggcgaggcgccgcgccgccgctgagacgggccccgcgcgcagcccggcggcgcaggtaaggccggccgcgccatggtggacccggtgggcttcgcggaggcgtggaaggcgcagttcccggactcagagcccccgcgcatggagctgcgctcagtgggcgacatcgagcaggagctggagcgctgcaaggcctccattcggcgcctggagcaggaggtgaaccaggagcgcttccgcatgatctacctgcagacgttgctggccaaggaaaagaagagctatgaccggcagcgatggggcttccggcgcgcggcgcaggcccccgacggcgcctccgagccccgagcgtccgcgtcgcgcccgcagccagcgcccgccgacggagccgacccgccgcccgccgaggagcccgaggcccggcccgacggcgagggttctccgggtaaggccaggcccgggaccgcccgcaggcccggggcagccgcgtcgggggaacgggacgaccggggaccccccgccagcgtggcggcgctcaggtccaacttcgagcggatccgcaagggccatggccagcccggggcggacgccgagaagcccttctacgtgaacgtcgagtttcaccacgagcgcggcctggtgaaggtcaacgacaaagaggtgtcggaccgcatcagctccctgggcagccaggccatgcagatggagcgcaaaaagtcccagcacggcgcgggctcgagcgtgggggatgcatccaggcccccttaccggggacgctcctcggagagcagctgcggcgtcgacggcgactacgaggacgccgagttgaacccccgcttcctgaaggacaacctgatcgacgccaatggcggtagcaggcccccttggccgcccctggagtaccagccctaccagagcatctacgtcgggggcatgatggaaggggagggcaagggcccgctcctgcgcagccagagcacctctgagcaggagaagcgccttacctggccccgcaggtcctactccccccggagttttgaggattgcggaggcggctataccccggactgcagctccaatgagaacctcacctccagcgaggaggacttctcctctggccagtccagccgcgtgtccccaagccccaccacctaccgcatgttccgggacaaaagccgctctccctcgcagaactcgcaacagtccttcgacagcagcagtccccccacgccgcagtgccataagcggcaccggcactgcccggttgtcgtgtccgaggccaccatcgtgggcgtccgcaagaccgggcagatctggcccaacgatggcgagggcgccttccatggagacgcagatggctcgttcggaacaccacctggatacggctgcgctgcagaccgggcagaggagcagcgccggcaccaagatgggctgccctacattgatgactcgccctcctcatcgccccacctcagcagcaagggcaggggcagccgggatgcgctggtctcgggagccctggagtccactaaagcgagtgagctggacttggaaaagggcttggagatgagaaaatgggtcctgtcgggaatcctggctagcgaggagacttacctgagccacctggaggcactgctgctgcccatgaagcctttgaaagccgctgccaccacctctcagccggtgctgacgagtcagcagatcgagaccatcttcttcaaagtgcctgagctctacgagatccacaaggagttctatgatgggctcttcccccgcgtgcagcagtggagccaccagcagcgggtgggcgacctcttccagaagctggccagccagctgggtgtgtaccgggccttcgtggacaactacggagttgccatggaaatggctgagaagtgctgtcaggccaatgctcagtttgcagaaatctccgagaacctgagagccagaagcaacaaagatgccaaggatccaacgaccaagaactctctggaaactctgctctacaagcctgtggaccgtgtgacgaggagcacgctggtcctccatgacttgctgaagcacactcctgccagccaccctgaccaccccttgctgcaggacgccctccgcatctcacagaacttcctgtccagcatcaatgaggagatcacaccccgacggcagtccatgacggtgaagaagggagagcaccggcagctgctgaaggacagcttcatggtggagctggtggagggggcccgcaagctgcgccacgtcttcctgttcaccgacctgcttctctgcaccaagctcaagaagcagagcggaggcaaaacgcagcagtatgactgcaaatggtacattccgctcacggatctcagcttccagatggtggatgaactggaggcagtgcccaacatccccctggtgcccgatgaggagctggacgctttgaagatcaagatctcccagatcaagaatgacatccagagagagaagagggcgaacaagggcagcaaggctacggagaggctgaagaagaagctgtcggagcaggagtcactgctgctgcttatgtctcccagcatggccttcagggtgcacagccgcaacggcaagagttacacgttcctgatctcctctgactatgagcgtgcagagtggagggagaacatccgggagcagcagaagaagtgtttcagaagcttctccctgacatccgtggagctgcagatgctgaccaactcgtgtgtgaaactccagactgtccacagcattccgctgaccatcaataaggaagatgatgagtctccggggctctatgggtttctgaatgtcatcgtccactcagccactggatttaagcagagttcaaatctgtactgcaccctggaggtggattcctttgggtattttgtgaataaagcaaagacgcgcgtctacagggacacagctgagccaaactggaacgaggaatttgagatagagctggagggctcccagaccctgaggatactgtgctatgaaaagtgttacaacaagacgaagatccccaaggaggacggcgagagcacggacagactcatggggaagggccaggtccagctggacccgcaggccctgcaggacagagactggcagcgcaccgtcatcgccatgaatgggatcgaagtaaagctctcggtcaagttcaacagcagggagttcagcttgaagaggatgccgtcccgaaaacagacaggggtcttcggagtcaagattgctgtggtcaccaagagagagaggtccaaggtgccctacatcgtgcgccagtgcgtggaggagatcgagcgccgaggcatggaggaggtgggcatctaccgcgtgtccggtgtggccacggacatccaggcactgaaggcagccttcgacgtcaataacaaggacgtgtcggtgatgatgagcgagatggacgtgaacgccatcgcaggcacgctgaagctgtacttccgtgagctgcccgagcccctcttcactgacgagttctaccccaacttcgcagagggcatcgctctttcagacccggttgcaaaggagagctgcatgctcaacctgctgctgtccctgccggaggccaacctgctcaccttccttttccttctggaccacctgaaaagggtggcagagaaggaggcagtcaataagatgtccctgcacaacctcgccacggtctttggccccacgctgctccggccctccgagaaggagagcaagctccctgccaaccccagccagcctatcaccatgactgacagctggtccttggaggtcatgtcccaggtccaggtgctgctgtacttcctgcagctggaggccatccctgccccggacagcaagagacagagcatcctgttctccaccgaagtctaaaggtcccagtccatctcctggaggcggacagatggcctggaaacctctggctaatcgggccatccgtagagcgggaaccttcctgaggtgtccttgggccacccccaagtgttgggccatctgccaagagacagcgacccaaagccgaaggacaggtggcctggaaagatcccgcccaggtctgggagccccaggctggcctcagactgtggttttttatgtggccacctgagggcgccccaagccagttcatctcggagtccaggcctggccctgggagacagggtgaagggagtggtttttatgaacttaacttagagtctaaaagatttctactggatcacttgtcaagatgcgccctctctggggagaagggaacgtgactggattccctcactgttgtatcttgaataaacgctgctgcttcatcctgtgggggccgtggccctgtccctgtgtgggtggggcctcttccatttccctgacttagaaaccacactccacttctaacagggtttgagaggcttagtcagcactgggtagcgttttgactccattcttggctttctttttctttccagaaggatttttgtgcagaaatgggtcttttgttgccatgttagtcctccttggaaggcagctcagaaggcctgtgaaatgtcaggggacaggacccccagggagggaaccccaggctacgcactttagggttcgttctccagggagagcgacctcgtcccccgatcctgaccgcccttccggcccacgctctcctgtttggcttccacaggcctggacttctctggcttctctgcccacacactccctgcccccagtgtccctgcccctgccccagcacaggtgacttcatttctgtcctctcagctcagtggactcgctcaacttttgtataagtctccacttggtggcagcagcttgctgatgacttgttttaaaactttcatcctaaataaccttttgatacttgaatatttgtaagttttatacatagtttctaatttttttccgaacagatccagatacctaataagatgctggaatgtaatccctggacaatccgtgtcctggcagcatttggtcttcctctaagcgcctggctccgctgttctcaggagtgggttctgaagtctctggagaacaggatacgtggagggttaggaaggggccaggcctagagacgggagactccctcccggagcaggtggaggcacaggaccattcgctaccccatctgccgacacctgcgggggagcccaggcattctttgtaaaccctcctgaccacctggctcaaagaaaacagaagcatggagaccgccaagtattttcaagaaataaccccatgaatattccatcacttttttagaaagaggggcttggggcaggcagaggagagaagggagagcaaactgagagccaagtttccacacggtcctgcaggaggagaggatgcagctgcccagagggaagcaggatcacatttaaggaagtgtgtggggtccctggatgacaccagcacccagtgcggctctgtctggcacccgctcccaaggtgggaggagtgggtgtcccctgtgtgtcagtgggcagctcctgctgaacccgcagctcactagggagcctgacagtggggccatgcgcctgacactcctctctgcttgtggacctggcaaggcagggagcagaaaacagccacttgaaggctttctgtctgcgtctgtgtgcagtgtggatttagttgtgcttttttcttgctgggagagcacagccaccatttacaagcagtgtcaccgtcgtgggtggcgaggacagaacaggagcctctgctctctgtacctatctgggcccggtgggctcccttgtcctggcttccatctctgtctcagcgaccattcagccctgcgcaggaacacgtgttgcttagaaaagccaaatccagccttgtctctgcctcctctggtctcatgatgtgcatctgttaccttgaaactggaaaccagtctatcaatgtctgtgccaattttttattccctccccaacctccttccccatacgactttttatttatgtaggatgtgtgctgtctaatgatgggatgaccacacttttccatgttctaaaagtgctcctctcccgcagggtcccagggctggtggttgctttgggtctacagctacgtcttacccacctcctgcctcaacagcctgtgtggtggcaaagccggtgtggggctggggaacgcagcgttctccaggagggggacctggctctccttctgcaatgcaggcgaaggcctagatgccagtgtgacctcccacaaggcgtggcttccagactccccggccggaagtgatgcttttttgccttgggccctgggtttgaagcagcctggctttctcttggtaagtggctggtgtcttagcagctgcaatctgagctcagccacctacacaccaccgtggccgacactttcattaaaaagtttcctgagacga

SEQ ID NO: 2349 - DNA, 173 bp, Homo sapiens
gagaagacgacagaagggcagccgagttcacccaaaggcagaactactttgatgaatctaagtgttatgtttgtgggaaaagtggacacctaagttacgcctgtccgaaaaatatgcttgaagtacgtgaacctccaaaaaaaaaaaaataaaaaaaaaaaaagtcgtatcga

SEQ ID NO: 2350 - DNA, 2592 bp, Homo sapiens
agagtctccagttggtgaccaagagtacatctcttttcaaatagctggattaggtcctcatgctgctgtggtcattgctggtcatctttgatgcagtcactgaacaggcagattcgctgacccttgtggcgccctcttctgtcttcgaaggagacagcatcgttctgaaatgccagggagaacagaactggaaaattcagaagatggcttaccataaggataacaaagagttatctgttttcaaaaaattctcagatttccttatccaaagtgcagttttaagtgacagtggtaactatttctgtagtaccaaaggacaactctttctctgggataaaacttcaaatatagtaaagataaaagtccaagagctctttcaacgtcctgtgctgactgccagctccttccagcccatcgaagggggtccagtgagcctgaaatgtgagacccggctctctccacagaggttggatgttcaactccagttctgcttcttcagagaaaaccaggtcctggggtcaggctggagcagctctccggagctccagatttctgccgtgtggagtgaagacacagggtcttactggtgcaaggcagaaacggtgactcacaggatcagaaaacagagcctccaatcccagattcacgtgcagagaatccccatctctaatgtaagcttggagatccgggcccccgggggacaggtgactgaaggacaaaaactgatcctgctctgctcagtggctgggggtacaggaaatgtcacattctcctggtacagagaggccacaggaaccagtatgggaaagaaaacccagcgttccctgtcagcagagctggagatcccagctgtgaaagagagtgatgccggcaaatattactgtagagctgacaacggccatgtgcctatccagagcaaggtggtgaatatccctgtgagaattccagtgtctcgccctgtcctcaccctcaggtctcctggggcccaggctgcagtgggggacctgctggagcttcactgtgaggccctgagaggctctcccccaatcttgtaccaattttatcatgaggatgtcacccttgggaacagctcggccccctctggaggaggggcctccttcaacctctctttgactgcagaacattctggaaactactcctgtgaggccaacaacggcctgggggcccagtgcagtgaggcagtgccagtctccatctcaggacctgatggctatagaagagacctcatgacagctggagttctctggggactgtttggtgtccttggtttcactggtgttgctttgctgttgtatgccttgttccacaagatatcaggagaaagttctgccactaatgaacccagaggggcttccaggccaaatcctcaagagttcacctattcaagcccaaccccagacatggaggagctgcagccagtgtatgtcaatgtgggctctgtagatgtggatgtggtttattctcaggtctggagcatgcagcagccagaaagctcagcaaacatcaggacacttctggagaacaaggactcccaagtcatctactcttctgtgaagaaatcataacacttggaggaatcagaagggaagatcaacagcaaggatggggcatcattaagacttgctataaaaccttatgaaaatgcttgaggcttatcacctgccacagccagaacgtgcctcaggaggcacctcctgtcatttttgtcctgatgatgtttcttctccaatatcttcttttacctatcaatattcattgaactgctgctacatccagacactgtgcaaataaattatttctgctaccttctcttaagcaatcagtgtgtaaagatttgagggaagaatgaataagagatacaaggtctcaccttcatctactgtgaagtgatgagaacaggacttgatagtggtgtattaacttatttatgtgctgctggatacagtttgctaatattttgttgagaatttttgcaaatatgttcattgggaatattggcctgaaattttcttttccactgtgtctctgccagaatgtttgtatcaggctgatgctggcttcatagaatgagttaggcaggagcccttcctccttgattttttggcatagtttcagcaggattggtaccagttattctttctgcatcttgtagaattcagctatgaatccatctggtctagggcttttgtgttggttggtaagttttttattactaattcaacttcagcgcttgatattggtctaggaggggtttctgtctcttcctggttcaatcttgggagattgtgtgtttccaggaatttagccgtttcctccagattttcttctttatgtgcatcgacttgagtgtaaacataacttatatgcactgggaaaccaaaaaatctgtgtgacttgctttattgcagcatttgttttattttggtagtctggaactgaacctgcaatatcaccaaagtatgcatatagttgcaaaaatgtgatttttgacatagtaaatatgagtatttgcaataaactatgatattacttttgtaagtatatagaataaaatgtaaataatctataaaa

SEQ ID NO: 2351 - DNA, 2836 bp, Homo sapiens
gttggactggtgggaactgggaacactggagacctgatttctaactgacgctaccgtcgcggccgccggcaagttcctttactgtgttttcttggttcagccttgaagtgagtcgtggacgatcctctctcagcgtccagcctagacggcggtgttgctccggcagcgttcctgggagccgagggccagagactaagttcctgggttctgagcctgccatccaaggaactcaggaggaggagttgacagtctcttcgttcctaaccagtgtgggacgacttcagcatgtctcaggccaccaagaggaagcatgtggtgaaggaggtgctaggggagcacatagtgccctccgaccagcagcagattgtcagggtactcaggaccccagggaacaatctgcatgaggtggagacagcccaagggcagcgcttcctggtgagcatgccctccaaataccgcaagaacatctggatcaagagaggggactttctcattgttgaccccattgaagagggagaaaaggtgaaggctgaaatctcgtttgtgctctgcaaggaccacgtgcgctctctgcagaaggaggggttttggcctgaggccttctctgaagtggctgagaaacacaacaacaggaacagacaaactcaaccagaactcccagctgagccacagttatcaggagaggagtccagctcagaagatgattctgacctgtttgttaacacaaaccgcagacagtatcatgagagtgaggaggagagtgaagaggaggaggcagcctgagactccaggacccaattctccacttgctcagggactggcccctggctcttctgggcttggacattcccagggtgctctgcacatcttcacccctgcatgaggacaaagcagggcacctctctgaactgatcttttgattcagagaattaaacccctggtgggttggtgacttgttctggtgtctgagtggctctctcgggggagggagattgtgatgaagtgaaaaactgctccctatttattagagaccttgtgggtgggtgggctgaatggggaggaaatgggaaatggctggagtctttcccaggtggtttgttctttcttattgggcacttagaaagtgccaggccgtgctctgggccttcttgcatgtgtttaacagctgggagcactcctgcttccttgcctgcttgcagttcataccaatttaagcattcaggatgacagccctaggacctaacacccacctgcctctaagagacgctcaggagcccatggtgcctcgtgctgctctccccacctttctagtcaccctgtgtacgggagtgctcacctccagctactgtgtccatccccacatacgacctcatctctcccactctgcaccatctatcacttccagaaggtggctggcaaatctctctatccttaactttgttttgaatggtccatccatctcctgactttatttgaaacctgattattccctgaggacattgattgtcttataaccttttaaatagaggctgcttttccaccctcacccttcattcttctaaccagccctgacattctcatgagtaaccttctgccttcacttccctcttgtgtagcatcaattccgtagtccaccctacacccctctgtctccctccattctgttccgctagtaaaaccctaaccctgggtaaacccaatcattcacctctgtgcccaaacccaagtcaccatcattaggtgagaaaacagccagcctggccaccagttgtaccttacgtttatcattacaaacctcagatggacactaagcactgcccagcagatctactctgggatgtctgtttcaaaacttctgtcttatctatcaattcccccttgtggtagttaccacaacacatgcctcattaagaaacagcaaccatcagagggaatgcctgcctccctgttaccagctctgcagatgtgcacatatcttcctgtcgtaagccaatgggacttaaaccttacctcttgtgttttggagactatctttttttttttttttttttttttgagagagtgtctccctgtgttgctcaggctggagtgcagtggtgtgatctcggctcactgtaaccttcacctactgggttcaagtaactctcctgcctcagcctcccgagtagcttggactacaggcgtgcaccaccacacctggctaactttttgtatttttagtagagacggggttttgccatgttgcccgggctggtctcgaactcctgaccttaaatgagcctcctgcctcagcctcccaaactgctgggattacaggcgtgtgccaccatgcctggctaatttttatattttcagtagagacgaggttttgccatgttggccaggctggtctcgaactcctgacctcaagtggtccacccaccttggcctcctagagtgctgggattacaggtgtgagccactgtgcccagcctcttttgctttcttaaagactttggtcgggtatttgtgttgttgagtattgtgtctgggtgtgggtatttgattctttttttgttttgtgtttttggctgtcctgtctattggatgtgatatgttatggatgtgatgtgttagtgtcgagcgtgctgtagaatctcccatctctgaaacaggcgtgaaaacctgtactgattcccacgtcctccagctaccacttcatttgtctgtttctcatttacttcctcttatagcgtggctttaaacatatatacatttgtatatatgtatatatgaatataatgtataaaatgtatgtagatgtatatacaaaaaataaacgagatgggttaaagat

SEQ ID NO: 2352 - DNA, 2579 bp, Homo sapiens; identical to SEQ ID NO: 2034

SEQ ID NO: 2353 - DNA, 1367 bp, Homo sapiens; identical to SEQ ID NO: 1487

SEQ ID NO: 2354 - DNA, 9215 bp, Homo sapiens
aaacagcgccgagccgccgccgcctcagcagcagcagcagcagcagcagcggcagcagcggccgtgcacgcccgggctgcggtcgcacagcgctaacgtgagcggccgccgccctcgccaccccgcctgcccactcccgccgccgccccgctctcgctttccccccggcctcccctcgccccttcccctcccccttcccggcgcactcggggggctgggaacgagctgccatgtgatgcgcgtcccctccgcgagctttcggtgacccacgaactgcccacctcgccggctgccgggagggggctgcgagccgggaagacgcggggaagaggaggcggaaaaggacgcaaagttctccggcgagcgcgttcgttcacatagctcccagttttaacatttcgccacctactgaagacatcatttgggaccaagctgatgagcccttgaagcacagcagataagagtgttgctgttgatcatctttgcctgggaagttgaatgataaagccagaagaaagcatgctttctgatcatttgcagctgtctgcttcagaaagtgagggctccaggaatgaggagaatcttcaagaacttcctcgcactgtgacatgtctgatcccttgctcccatccctgcagcatgaacaaggtggacactcactgacctgtcacaaggttgccccacaaaactttggggtccatgtctgaatggattgccagagccttctcatctctcccttcgcccagttccctgcatcctaagactcgaaggcagcacaggacctggaaaaattacatggtgtgaacggcatgtctgtggatgagaagcctgactcccccatgtatgtgtatgagtccacagtccactgcaccaacatcctcctgggcctcaatgaccagcggaaaaaggatattctctgtgacgtgactttgatcgtggagaggaaggagttccgggcccaccgggctgtgctggccgcatgcagtgaatatttttggcaggcgctggttggacagacaaaaaatgatttggtggtcagcttgcctgaggaggtcacagccaggggctttgggccgctgttacagtttgcctacactgccaagctgttactcagcagagaaaacatccgcgaggtcatccgctgtgctgagttcctgcgcatgcacaacctggaggactcctgcttcagcttcctgcagacccagctcctgaacagtgaggatggcctgtttgtgtgccggaaggatgctgcgtgccagcgcccacacgaggactgcgagaactctgcaggagaggaggaggatgaagaggaggagacgatggattcagagacggccaagatggcttgccccagggaccagatgcttccagagcccatcagctttgaggccgccgccatccccgtagcagagaaggaagaagccctgctgcccgagcctgacgtgcccacagacaccaaggagagctcagaaaaggacgcgttaacgcagtaccccagatacaagaaataccagcttgcatgtaccaagaatgtctataatgcatcatcacacagtacctcaggttttgcaagcacattccgggaagataactctagcaacagcctcaagccggggcttgccagggggcagattaaaagtgagccgcccagtgaagagaatgaggaagagagcatcacgctctgcctgtctggagatgagcctgacgccaaggacagagcgggggatgtcgagatggaccggaaacagcccagccctgcccctacccccacggccccagctggggccgcctgcctggagagatccaggagcgtggcctcgccctcctgcttaaggtctctgttcagcataacgaaaagtgtggagctgtctggcctgcccagtacatctcagcagcactttgccaggagtccagcctgcccttttgacaaggggatcactcagggtgaccttaaaactgactacacccctttcacagggaattatggacagccccacgtgggccagaaggaggtgtccaacttcaccatggggtcgcccctcagggggcctgggttggaggctctctgtaaacaggagggagagctggaccggaggagcgtgatcttctcctccagcgcttgtgaccaagtgagcacctcggtgcattcttattctggggtgagcagtttggacaaagacctctctgagccggtgccaaagggtctgtgggtgggagccggccagtccctccccagctcgcaggcctactcccacggtgggctgatggccgaccacttgccaggaaggatgcggcccaacaccagctgcccggtaccaatcaaagtctgccctcgctcaccccccttggagaccaggaccaggacttccagctcctgctcttcctattcctacgcggaggacgggagcgggggctcaccctgcagcctccctctctgtgagttctcctcctcgccctgttcccagggagccagattccttgccacagaacatcaggaaccaggcctgatgggagatggaatgtacaaccaagtgcggccccaaattaaatgtgagcagtcttatggaaccaactccagtgacgaatccggatcgttctcggaagcagacagtgagtcgtgtcctgtgcaggacaggggccaggaggtaaaacttccttttcctgtagatcaaatcacagatcttccaaggaacgatttccagatgatgattaaaatgcacaagctaacctcagaacagttagagtttattcatgatgtccgacggcgcagcaagaaccgcatcgcggcccagcgctgccgcaaaaggaaactggactgtattcagaatttagaatgtgaaatccgcaaattggtgtgtgagaaagagaaactgttgtcagagaggaatcaactgaaagcatgcatgggggaactgttggacaacttctcctgcctttcccaggaagtttgccgagacatccagagccccgagcagatccaggccctgcatcggtattgccctgtcctcagacccatggacttgcccacggcctccagtattaaccctgcgcccttgggtgctgagcagaacattgcggcctcccaatgcgcagtgggggaaaacgtgccctgctgcttggagccaggcgcggctccccccggacccccctgggcacccagcaacacctccgagaattgtacctctgggaggagactagaaggcactgacccgggaaccttctcagagagaggacctcctcttgaacccaggagccaaacagtgaccgtggacttctgccaggaaatgactgataagtgtacaactgacgaacagcccaggaaagattatacctagtgactcggctctgcctcccagtccgcacacctctcccatccaggcgttcttcagtcagcctgtggcactgttcatctgctgtcccgaagaaaccgagaacacatttggtgcacactacagcggtcttagcagcaatactgttccgaagtatcctctcctcttctcgagcaggagtgatagttaccttcacaatggtgctaccccttgcccaggcaaggaaagacagcagtgatgacactgtctgtctgtggctcaatttcagtcttcacagggatagactacaacacctctaggccccaaccacggattttttttctcagtggcccatgtcacaaaccctatctcaggaatttcttctgaatgttcaatttttttcattgaagacagcttctatacacatcaaagttttatagctagactgtacatattatatataatatatatataaaatatatatatatatatatatatatccatatgcaaaagtcctgcatgcctcaactttctcatcctaaaactggaaacttatttctcatttagaaacaggttccaacattcctcttcttttgtctctgatgctagaactagtttggtaactgttaacatggtcatttttcttgcttcacagttcaattttcaattcgtacttatttatggacaaaattcagtgttggaagctttttcccaaggttttatttcagatttctttttcgtttggtttggttttggcacctccaagtggtgtcatttgagcattgtaggtttgttttttgtttgtttggggggttttgtttgtttttgtttttgtttttgttttccttgcagatactgtacagtaatggtcaactttgccacttgcactgagttttgggtcaaacctattttcttaaatgaagttgtaacttcggtataactcaagtatactgtatattctttgcttttagttaaaaaagtaaaacattttagctaattaaaaagcactcaggtgataattatgtaggaaaaacaatcttgccaaataatgaattcatcctaggatgtgtagacaataatctgcttgaatatttttatatttcacctcctccccacctttccctaagcaaagtttaaacgcagatagagagttcagagttgatgctggatgttcagattcctaagtggggagagagtttggacatctcactcaaaagtacatcagaaaaacaggaatccgtgattttataccagaactcagcaggcattggctcctagaaatcaagttagaaagttttcacccagggagtaagtcccattcatttcaacacgtcctgaggcctcggcttgctcttggaagtgttgtgcagtaggacctgctcccctgaaggacggggccaaccagccactggctttcctgcccaggcttggcctcccaggacatctggcctgaggggatttgaatcacagccccgaaggtcctgccttcaccccattgggagagagcagggcatcctggcatctgcgatccatccctgacacaggctgacacattctttctcctttccttctccaaaggcttggagttttcttctgaggtttttctgccagtgtcttgtctgaaggcagacttcattctgaggctttggacaagctatcaccgggaaccctccctgtccccttcccgaatcacacacataccctaccctcacctgatgataattttctcttcttgctgcaaaactggttggcttgcaacccagagagagcagcttcccttggctctggggccgtgttggccccagccacgtttacaggaaggtgtgccccagaggaggaggaatcagctccctcgctccagtggccttgggtccgggtctcactgagcagcccgagggccactccagcccggctggggaagagagtcctgaacggtttgatgtggggatggggtggtgggcagtggggaatagatggttgactttgtttctttatttgtgccattgtttggacaatattaaagctgcatgtaaaaggggaaattagtatatgatgtaggctaaaagtgaaatcatagtaacatatgttttagtattattaacttttttctgtacaaatattagcactaaatgtttaaatatgtatgaatgccagaaatttgtcagttcatgcagtaggataaaaaaaaaaaaaaaaaaaaaaaaaaggcttttctttttaaacagttccacttttaaaacctgcctctgggtttttgttttttcttgtttgtgtgtgtgtgtgtgtgtgtgtgtgtgtgtgtgtgtgtgtgtgtgtgtgtctgaaacagatcttgataaagctctgtgttggagctgctggtttttgttatggttgttggaatttcttggcctactaggacagttctgtgcttcaccatgaggtttgcctttgtggaaaactggtgacagtgagaatataaactcaatgtgaatcacgtgatacttcgcaggcgtgtgttacagtggagtcagctgacagtattttgctttttaactctattgttgcctttccaagtgacctctcctcttcttttaaaaaaagaacactttctgctcatatcataaccaggtccaacccagcttcttggcatgaggtttaccctggtaacaactcatgtgcaactggtagtcttgaccacattccatccatttcctcaggtttctgtggttcagtagcccagacctgtttggcagccatttctagcaggggcggggcctctttatttctctccaccctaactcagacctcaccttcctcccacccacccctgccttgcttttcttcctcttcccccaacctaacttctgccatgggaactggttaaaaacactgctctaaaaaccatcttccaatttcatagagatttctcacaagttatttcattcataatccaccatgaacagtgactagcttcgtgcagttgttcatgtgatgtgtgtgtgtcttttcctattcagaactatgtgcttgtcaaaattatttctgggttgattcaaagggaggacttgctggggaccagaatccaaacggcctcaagtggaattttaaaacctagcctgtctcttttccctgggatccctctgtcaaccccacgccttttaggaaaaagaaaagtgagtgaacagcaaggaagagtgtttgcacagtacagtaacatttggttgttcttaaggctcttttcttacaaaaataagagaccctccaaccacgggctgtttaggaggatgcctgcttgggtctccaaatggctggggtaggaatggttgttggggcagagccagtggaggtgagtgaccctgagactaatgaacatcccacctaaatccagtcctccccttggatctgcctttgtcctgcttgtgtatccaggcaacctcttttcaagttggtcaggctttggacaggtgagtgatttgctgtatgtgtttgtttctctgcgttacctgggggtgccttgattaaaatcgaactttattacatactgattctggaacaaaacagttagaaaaactttaaaaaaaaaaaaaccgacaaagttacgaggccatcctgctatttatcttctgagttcccagcaatgactcaggcatcagagatgatgctgcagtggaaaacctgactctgtgtgtctgcaactgaatgttgtgcgagtaatttattaactgtctttctaaaggtttgctgcttttaagatgcactataattcgggatgtaatccttacattgcttttccaaggaagggaacaaaagtctagtgattagtatgccaactgccactactccttcaaaaggagccaggaccagcgacaagactcatgagaggactggctaaagtgaagtgtgcacagtgtgaagtttaatgctgttgtcaagaggcctaaacccacattttctcttttaatattttatgattgccatcaaagaagaagaaaaagaaggaacagacaaaggtttgaaaatgataagcctgttaagacaccaaaaactcctgtcccgtgaagctgcttgacatcctgtggagtagcataatcctctcaaaatgaggaagagctgcctgcaaagctttctcaagtccctatttggctacctacttctctacattatgccccatttaaactaggagctgtcttagaaatgacttcaaactgcttcactattgcttacagtttaggaggagtctcagatccagaaggagcaagaatcaagtttggtcctcaaatgactgtaaatagactaaagaacaaggtgttttttgtttttgtttttgttttctaagaataaagctgttcgttgtatcatgagttagtgtttcttccccaaactgaagactgtgttggaagtgcaatttctggtgagtcagtccacaatacaatgccctgtgtggagttggtattcatacaggaaatctgtgtgcacgaggcattgtgtgttgaaagtgtatgtttatagtactgcctgagccatctcatgaccccagcgtccaaaaccgatgctgtagaacagaacatatctgtacacaaatagtgtgtgcaaatagcatttgtacatagaaaagtctcattgtggcagattgagcataaattattcaactgacggtgcaaaaacattacttgcaaagaaaagtttatagtattttcctacactccaccctgggagatgatatttctatcaaatgaatatcagtgcattttaaatgtaatatgaaaacgatgctgccattttgtgaagaatacccacttggttgcagaggccaactttcatagctttgatttaatgttgtgacacggtgtatgcattttgctgtcaagcaatggataaacagctctgactttcattctcattccagtttattgacctcagataaaacactggcccttcttagaagcagaagtgtgcaccaagaccattcatttcaggtagactcacattcagtgccaagtgctcccatgggaataatcagacgcatatgttgcgaaagagtgaagggacttggacaaagaggggttttcctacagatggatgctcagtcttctaccaaaacatgtttggaggcagaactatgacctccccttaagtcctaacaatgtattttgtgtgtgcaaatcctgggatgcccgtttcacgctctgacataaagacatggcacctctagtgagtgatcaggaagattccatatgcatttgggagcttcaggtgcttgttagacacagtgagccattcaaggcaagcaccacctttgctagtgaggccaagagagcctgtgacaatttgacaatttgttccagaaccagtctgatgcaagtgcacctctaatatatgccttacaaactccagaggccatattcaaaacagggtcttctcagtgtatgcaaggggctgcagcccctcttctcttcctccccaggttgaacaatacggacagttttcacacatatctacctgtataaccctctgtacctctcataactggtcaacgactgtaacaggttacatcaggtgtttttctacatactttttacacagattctatgcgattaatgtaatttaattcaatgcatcattttattgtactagttcttaggcttgtccttatttttttctaagtgattgtggtttttctcgtggtttttattgtaaaaaatgaaaggctgttgatgcttattctctgtaactaagaatttttaccttttgggggaaaaaagcattgctatgaactaatgaattgaaacttcatttactcattgtaaatacactattgtgcaaaaaaagttttcactcaattgaattgctagtgttaactgaattttgtctagacaccatttctgttgatgaaataaagacatatcattatgcattgtaaactga

SEQ ID NO: 2355 - DNA, 4340 bp, Homo sapiens
attcattcattccccgtggcactggaggcggcccactctgctctgtcagcttcggagctcctccaccctggctgccgaaagccccttcccgccatctaatgatacactctgcatacgcttctgttgagaatttgtggctagacattcctgtgggaccgggaatccaaattcttgggtacaaacagaaacttactttccttggggatttttttctctctctcactcacacacactctcgcgttctttccttttttctttttcgtagcagcaggggggaaaaaagagacaaaaacaaaacaaaaaacaacaaaaagcaacaccccccccttttattttcaaaagtagctagaggaaaaaaaaataaaacaacagccaaccaagtgaatcccaacccaaccccctgaagggctgaaaattctcgccttcttcagagcggggcatggcatcgaacagcatcttcgactccttcccgacctactcgccgaccttcatccgcgacccaagcaccagccgccgcttcacacctccctccccggccttcccctgcggcggcggcggcggcaagatgggcgagaacagcggcgcgctgagcgcgcaggcggccgtggggcccggagggcgcgcccggcccgaggtgcgctcgatggtggacgtgctggcggaccacgcaggcgagctcgtgcgcaccgacagccccaacttcctctgctccgtgctgccctcgcactggcgctgcaacaagacgctgcccgtcgccttcaaggtggtggcattgggggacgtgccggatggtacggtggtgactgtgatggcaggcaatgacgagaactactccgctgagctgcgcaatgcctcggccgtcatgaagaaccaggtggccaggttcaacgaccttcgcttcgtgggccgcagtgggcgagggaagagtttcaccctgaccatcactgtgttcaccaaccccacccaagtggcgacctaccaccgagccatcaaggtgaccgtggacggaccccgggagcccagacggcaccggcagaagctggaggaccagaccaagccgttccctgaccgctttggggacctggaacggctgcgcatgcgggtgacaccgagcacacccagcccccgaggctcactcagcaccacaagccacttcagcagccagccccagaccccaatccaaggcacctcggaactgaacccattctccgacccccgccagtttgaccgctccttccccacgctgccaaccctcacggagagccgcttcccagaccccaggatgcattatcccggggccatgtcagctgccttcccctacagcgccacgccctcgggcacgagcatcagcagcctcagcgtggcgggcatgccggccaccagccgcttccaccatacctacctcccgccaccctacccgggggccccgcagaaccagagcgggcccttccaggccaacccgtccccctaccacctctactacgggacatcctctggctcctaccagttctccatggtggccggcagcagcagtgggggcgaccgctcacctacccgcatgctggcctcttgcaccagcagcgctgcctctgtcgccgccggcaacctcatgaaccccagcctgggcggccagagtgatggcgtggaggccgacggcagccacagcaactcacccacggccctgagcacgccaggccgcatggatgaggccgtgtggcggccctactgaccgccctggtggactcctcccgctggaggcggggaccctaacaaccttcaagaccagtgatgggccggctccgaggctccgggcgggaatgggacctgcgctccagggtggtctcggtcccagggtggtcccagctggtgggagcctctggctgcatctgtgcagccacatccttgtacagaggcataggttaccacccccaccccggcccgggatactgcccccggcccagatcctggccgtctcatcccatacttctgtggggaatcagcctcctgccacccccccggaaggacctcactgtctccagctatgcccagtgctgcatgggacccatgtctcctgggacagaggccatctctcttccagagagaggcagcattggcccacaggataagcctcaggccctgggaaacctcccgacccctgcaccttcgttggagcccctgcatcccctgggtccagccccctctgcatttacacagatttgagtcagaactggaaagtgtcccccacccccaccaccctcgagcggggttcccctcattgtacagatggggcaggacccagcacgctgctggcagagatggtttgagaacacatccaagccagtccccccagcccagcttcccctccgttcctaactgttggctttcccccagccgcacgggtcccaggccccagagaagatgagtctatggcatcaggttcttaaacccaggaaagcacctacagaccggctcctccatgcactttaccagctcaacgcatccactctctgttctcttggcagggcgggggaggggggataggaggtcccctttcccctaggtggtctcataattccatttgtggagagaacaggagggccagatagataggtcctagcagaaggcattgaggtgagggatcattttgggtcagacatcaatgtccctgtcccccctgggtccagccaagctgtgccccatcccccaagcctcctgggaggatccagccaaatcttgcgactcctggcacacacctgtctgtaacctgttttgtgctctgaaagcaaatagtcctgagcaaaaaaaaaaaaaaaacaaaaaaacaaaaaaaaaacaaaacagtttttaaaactgattttagaaaaagaagcttaatctaacgttttcaaacacaaggtctcttacaggtatagttccgtgattatgatagctctgtgattataagcaacatccccgccccctctcccccccgcggacccccagctgcctcctgagggtgtggggttattagggtctcaatactttctcaaggggctacactccccatcaggcagcatcccaccagcctgcaccacaggctcccctgggaggacgagggaaacgctgatgagacgctgggcatctctcctctgtggctctaggacatctgtccaggaggctgggcggaggtgggcaggatgtgagaggtggggagtactggctgtgcgtggcaggacagaagcactgtaaagggctctccagccgcagctcagctgcactgcgttccgaggtgaagtcttgcccctgaattttgcaaaatgggaaagtgggcgcttgcccaagggccaggctgcatggattctcacatcagagttctctggccctagaaaggcttagaaaaggcgtaagggaactcataaaggctagcagcatgcggtattttaactttctgcctcggcctctgtggatgcagaaatctgccctacaaaatgctcttcattggttgtctctgtgagagcactgtccccacccaacctgtcacaacggccagaaccatacaccagagacacactggcaggttaggcagtccttctggtgatcctattccattccctcctgctgcggtttctcttggcctgtcctcactggaaaaacagtctccatctcctcaaaatagttgctgactccctgcacccaaggggcctctccatgccttcttaggaagcagctatgaatccattgtccttgtagtttcttccctcctgttctctggttatagctggtcccaggtcagcgtgggaggcacctttgggttcccagtgcccagcactttgtagtctcatcccagattactaacccttcctgatcctggagaggcagggatagtaaataaattgctcttcctaccccatcccccatcccctgacaaaaagtgacggcagccgtactgagtctgtaaggcccaaagtgggtacagacagcctgggctggtaaaagtaggtccttatttacaaggctgcgttaaagttgtactaggcaaacacactgatgtaggaagcacgaggaaaggaagacgttttgatatagtgttactgtgagcctgtcagtagtgggtaccaatcttttgtgacatattgtcatgctgaggtgtgacacctgctgcactcatctgatgtaaaaccatcccagagctggcgagaggatggagctgggtggaaactgctttgcactatcgtttgcttggtgtttgtttttaacgcacaacttgcttgtacagtaaactgtcttctgtactatttaactgtaaaatggaattttgactgatttgttacaataatataactctgagatgtgtggaagga

SEQ ID NO: 2356 - DNA, 1593 bp, Homo sapiens
gcggtgcccttgcggcgcagctggggtcgcggccctgctccccgcgctttcttaaggcccgcgggcggcgcaggagcggcactcgtggctgtggtggcttcggcagcggcttcagcagatcggcggcatcagcggtagcaccagcactagcagcatgttgagccgggcagtgtgcggcaccagcaggcagctggctccggttttggggtatctgggctccaggcagaagcacagcctccccgacctgccctacgactacggcgccctggaacctcacatcaacgcgcagatcatgcagctgcaccacagcaagcaccacgcggcctacgtgaacaacctgaacgtcaccgaggagaagtaccaggaggcgttggccaagggagatgttacagcccagatagctcttcagcctgcactgaagttcaatggtggtggtcatatcaatcatagcattttctggacaaacctcagccctaacggtggtggagaacccaaaggggagttgctggaagccatcaaacgtgactttggttcctttgacaagtttaaggagaagctgacggctgcatctgttggtgtccaaggctcaggttggggttggcttggtttcaataaggaacggggacacttacaaattgctgcttgtccaaatcaggatccactgcaaggaacaacaggccttattccactgctggggattgatgtgtgggagcacgcttactaccttcagtataaaaatgtcaggcctgattatctaaaagctatttggaatgtaatcaactgggagaatgtaactgaaagatacatggcttgcaaaaagtaaaccacgatcgttatgctgagtatgttaagctctttatgactgtttttgtagtggtatagagtactgcagaatacagtaagctgctctattgtagcatttcttgatgttgcttagtcacttatttcataaacaacttaatgttctgaataatttcttactaaacattttgttattgggcaagtgattgaaaatagtaaatgctttgtgtgattgaatctgattggacattttcttcagagagctaaattacaattgtcatttataaaaccatcaaaaatattccatccatatactttggggacttgtagggatgcctttctagtcctattctattgcagttatagaaaatctagtcttttgccccagttacttaaaaataaaatattaacactttcccaagggaaacactcggctttctatagaaaattgcactttttgtcgagtaatcctctgcagtgatacttctggtagatgtcacccagtggtttttgttaggtcaaatgttcctgtatagtttttgcaaatagagctgtatactgtttaaatgtagcaggtgaactgaactggggtttgctcacctgcacagtaaaggcaaacttcaacagcaaaactgcaaaaaggtggtttttgcagtaggagaaaggaggatgtttatttgcagggcgccaagcaaggagaattgggcagctcatgcttgagacccaatctccatgatgacctacaagctagagtatttaaaggcagtggtaaatttcaggaaagcagaagtt

SEQ ID NO: 2357 - DNA, 1993 bp, Homo sapiens
ctaacttgtctggccgttcttgcgtagggggcgggactaaggctgtcaattggtctgtttttgtgccgatcaatgagatgggtgcggtgattggcgactaccttgagagtagcgggttgaggtgtaagccctgaggaggcagcgttttctgggcttctgtctggttctctctctccagaaggttctgccggttcccccagctctgggtacccggctctgcatcgcgtcgccatgatgggccatcgtccagtgctcgtgctcagccagaacacaaagcgtgaatccggaagaaaagttcaatctggaaacatcaatgctgccaagattcaagtccagcatccagcggccaagtccatgatcgaaattagccggacccaggatgaagaggttggagatgggaccacatcagtaattattcttgcaggggaaatgctgtctgtagctgagcacttcctggagcagcagatgcacccaacagtggtgatcagtgcttaccgcaaggcattggatgatatgatcagcaccctaaagaaaataagtatcccagtcgacatcagtgacagtgatatgatgctgaacatcatcaacagctctattactaccaaagccatcagtcggtggtcatctttggcttgcaacattgccctggatgctgtcaagatggtacagtttgaggagaatggtcggaaagagattgacataaaaaaatatgcaagagtggaaaagatacctggaggcatcattgaagactcctgtgtcttgcgtggagtcatgattaacaaggatgtgacccatccacgtatgcggcgctatatcaagaaccctcgcattgtgctgctggattcttctctggaatacaagaaaggagaaagccagactgacattgagattacacgagaggaggacttcacccgaattctccagatggaggaagagtacatccagcagctctgtgaggacattatccaactgaagcccgatgtggtcatcactgaaaagggcatctcagatttagctcagcactaccttatgcgggccaatatcacagccatccgcagagtccggaagacagacaataatcgcattgctagagcctgtggggcccggatagtcagccgaccagaggaactgagagaagatgatgttggaacaggagcaggcctgttggaaatcaagaaaattggagatgaatactttactttcatcactgactgcaaagaccccaaggcctgcaccattctcctccggggggctagcaaagagattctctcggaagtagaacgcaacctccaggatgccatgcaagtgtgtcgcaatgttctcctggaccctcagctggtgccagggggtggggcctccgagatggctgtggcccatgccttgacagaaaaatccaaggccatgactggtgtggaacaatggccatacagggctgttgcccaggccctagaggtcattcctcgtaccctgatccagaactgtggggccagcaccatccgtctacttacctcccttcgggccaagcacacccaggagaactgtgagacctggggtgtaaatggtgagacgggtactttggtggacatgaaggaactgggcatatgggagccattggctgtgaagctgcagacttataagacagcagtggagacggcagttctgctactgcgaattgatgacatcgtttcaggccacaaaaagaaaggcgatgaccagagccggcaaggcggggctcctgatgctggccaggagtgagtgctaggcaaggctacttcaatgcacagaaccagcagagtctccccttttcctgagccagagtgccaggaacactgtggacgtctttgttcagaagggatcaggttggggggcagcccccagtccctttctgtcccagctcagttttccaaaagacactgacatgtaattcttctctattgtaaggtttccatttagtttgcttccgatgattaaatctaagtcatttgagaaagtt

SEQ ID NO: 2358 - DNA, 1939 bp, Homo sapiens
cgcctccgccttcggaggctgacgcgcccgggcgccgttccaggcctgtgcagggcggatcggcagccgcctggcggcgatccagggcggtgcggggcctgggcgggagccgggaggcgcggccggcatggaggcgctgctgctgggcgcggggttgctgctgggcgcttacgtgcttgtctactacaacctggtgaaggccccgccgtgcggcggcatgggcaacctgcggggccgcacggccgtggtcacgggcgccaacagcggcatcggaaagatgacggcgctggagctggcgcgccggggagcgcgcgtggtgctggcctgccgcagccaggagcgcggggaggcggctgccttcgacctccgccaggagagtgggaacaatgaggtcatcttcatggccttggacttggccagtctggcctcggtgcgggcctttgccactgcctttctgagctctgagccacggttggacatcctcatccacaatgccggtatcagttcctgtggccggacccgtgaggcgtttaacctgctgcttcgggtgaaccatatcggtccctttctgctgacacatctgctgctgccttgcctgaaggcatgtgcccctagccgcgtggtggtggtagcctcagctgcccactgtcggggacgtcttgacttcaaacgcctggaccgcccagtggtgggctggcggcaggagctgcgggcatatgctgacactaagctggctaatgtactgtttgcccgggagctcgccaaccagcttgaggccactggcgtcacctgctatgcagcccacccagggcctgtgaactcggagctgttcctgcgccatgttcctggatggctgcgcccacttttgcgcccattggcttggctggtgctccgggcaccaagagggggtgcccagacacccctgtattgtgctctacaagagggcatcgagcccctcagtgggagatattttgccaactgccatgtggaagaggtgcctccagctgcccgagacgaccgggcagcccatcggctatgggaggccagcaagaggctggcagggcttgggcctggggaggatgctgaacccgatgaagacccccagtctgaggactcagaggccccatcttctctaagcaccccccaccctgaggagcccacagtttctcaaccttaccccagccctcagagctcaccagatttgtctaagatgacgcaccgaattcaggctaaagttgagcctgagatccagctctcctaaccctcaggccaggatgcttgccatggcacttcatggtccttgaaaacctcggatgtgtgcgaggccatgccctggacactgacgggtttgtgatcttgacctccgtggttactttctggggccccaagctgtgccctggacatctcttttcctggttgaaggaataatgggtgattatttcttcctgagagtgacagtaaccccagatggagagataggggtatgctagacactgtgcttctcggaaatttggatgtagtattttcaggccccacccttattgattctgatcagctctggagcagaggcagggagtttgcaatgtgatgcactgccaacattgagaattagtgaactgatccctttgcaaccgtctagctaggtagttaaattacccccatgttaatgaagcggaattaggctcccgagctaagggactcgcctagggtctcacagtgagtaggaggagggcctgggatctgaacccaagggtctgaggccagggccgactgccgtaagatgggtgctgagaagtgagtcagggcagggcagctggtatcgaggtgccccatgggagtaaggggacgccttccgggcggatgcagggctggggtcatctgtatctgaagcccctcggaataaagcgcgttgaccgccgaaaaaaaaaaaaaaaaaaaa

SEQ ID NO: 2359 - DNA, 4255 bp, Homo sapiens
tggcttgaagtcccctcctccatcccggggatcacgttttgcctgggggagctgatcgcaagactaggcaacctccagccagtccctgggtcgggcggatcctcccagaggtggcacaatggagcgatctccaggagagggccccagccccagccccatggaccagccctctgctccctccgaccccactgaccagccccccgctgctcacgcaaagccagacccaggttctgggggccaacctgctggccctggcgcggcgggtgaggccctggcggtgctgacttcattcgggaggcggttgctggtgctgatacctgtgtatttggccggggcagtgggactcagcgtgggtttcgtgctcttcggcctcgccctctacctgggctggcgccgggtccgcgacgagaaagaacggagccttcgagcagcgaggcagctactggacgacgaggagcagctcactgcgaaaactctctatatgagtcatcgagagctacctgcctgggtcagcttcccagacgtggaaaaggctgaatggctcaataagattgtggcccaggtctggcccttcctgggccagtatatggagaagcttctggctgaaactgtggctccggctgttaggggatctaacccccatctgcaaacatttacatttacacgagtggaactgggtgaaaagccattgcgcatcattggagtcaaggttcacccaggtcagagaaaagagcagatcctgctggacttgaacatcagctatgtaggtgatgtgcagattgatgtggaagtgaagaaatatttttgcaaagcaggagtcaagggcatgcagctacatggcgttttgcgggtgatactggagccactcattggggaccttcccttcgtgggggctgtgtcaatgttcttcatccgacgcccgaccctagacatcaactggacagggatgaccaacctgctggatatcccaggacttagctcactctctgacaccatgatcatggactccattgctgccttcctcgtgttgcccaaccgattactggtgccccttgtgcctgaccttcaagatgtggctcagttgcgttcccctctgcccaggggcattattcgaattcacctgctggctgctcgagggctgagttccaaggacaaatatgtgaagggcctgattgagggcaagtcagacccatatgcacttgtgcgtttgggtacccagacattctgcagtcgtgtcattgatgaagaactcaacccacagtggggagagacttatgaggtgatggtacacgaggtcccagggcaggagattgaagtggaggtgttcgacaaggatccagataaagatgactttctgggcagaatgaagctggatgtagggaaggtgttacaggctagcgttctggatgattggttccctctacaaggtgggcaaggccaagttcacttgaggctagaatggctgtcacttttgtcagatgcagagaaactggagcaggttctacagtggaattggggagtctcctctcgaccagatcccccgtcagctgccatcttagttgtctacctggatcgggcccaggatcttcctctgaagaaggggaacaaggaacccaaccctatggtacaactgtcaattcaggatgtgactcaggagagcaaggctgtctacagtaccaactgcccagtgtgggaggaagcgttccggttcttcctacaagaccctcaaagccaggagctcgatgtgcaagtgaaggatgattccagggccctgactttaggagcactgacgctgcctctggcccgcctgctgactgccccagaactcatcctggaccagtggttccagctcagcagctctggtccaaactccagactctatatgaaactagtcatgaggatcctgtacttggattcatcagaaatatgcttccccacggtgcctggttgtcctggtgcttgggacgtggacagtgagaatccccagagaggcagcagtgtggatgccccacctcgaccctgtcacacgactcctgatagccagtttgggactgagcatgtgcttcggatccatgtattagaggcccaggacctgattgccaaagaccgtttcttggggggactggtgaagggcaagtcagacccctatgtcaaactaaagttggcaggacgaagcttccggagccatgttgttcgggaagatctcaatccccgctggaatgaggtttttgaggtgatcgtcacatcagttccaggccaagagctagaggttgaagtctttgacaaggacttggacaaggatgattttctgggcaggtgtaaagtgcgtctcaccacagtcttaaacagtggcttccttgatgagtggctgaccctggaggatgtcccatctggccgcctgcacttgcgcctggagcgtctcaccccccgtcccactgctgctgagttagaggaggtgctgcaggtgaatagtttgatccagactcagaagagtgcggagctggctgcggccctgctatccatctatatggagcgggcagaggacctcccgctgcgaaaaggcaccaagcacctcagcccttatgctactctcactgtgggagatagttctcataaaaccaagactatttcgcaaacttcagcccctgtctgggatgagagtgcctcctttctcatcaggaaaccacacactgagagcctagagttgcaggttcggggtgagggcactggcgtgctgggctcattatccctgcccctctcagagctcctcgtggctgaccagctctgcttggaccgctggtttacactcagcagtggtcaggggcaggtgctactgagagcacagctagggatcctggtgtcccagcactcgggagtggaagctcatagccacagctacagccacagctcctcatcgctgagtgaagaaccagagctctcggggggaccccctcacatcacctcctcagccccagagctccggcagcgcctaacacatgttgacagtccccttgaggctccagccgggcctctgggccaggtgaaactgactctgtggtactacagtgaagaacgaaagctggtcagcattgttcatggttgccggtcccttcgacagaatggacgtgatcctcctgatccctatgtgtcactgttgctactgccagacaagaaccgaggcaccaagaggaggacctcacagaagaagaggaccctgagtcctgaatttaatgaacggtttgagtgggaactccccctggatgaggcccagagacgaaagctggatgtctctgtcaagtctaattcctccttcatgtcaagagagcgtgagctgctggggaaggtgcagctggacctagctgagacagacctttcccagggtgtagcccggtggtatgacctgatggacaacaaggacaagggcagctcctaggagctggcgagtcccagcctgactgctctgtcttcctgccttcgtctcgctccatcaccgcctcaatgtgatgagcctaaagctagggtccaagggcagagcctgtgcccttcagccctttcacctaacaggcccatattcgggcctttgcctgaccaaagagaagaaccgtatgttccctttactgcacggcctttatccttctgggcccctggggcggggacctgagctggctgtttcctgctttgcctgcacattgttctcccttcctcccaactcctcagggccttctgtatctgtgcctggccagtggcagcactagcagtggtattagcttatgccaaatacagctttggaaggatctttttttctttaactagatggtcaccttcttccctaccacacatgggtgggaaggtggacaggctaacctctccagctgtgagcctcttagactactgcatgtagcaaatgttcagcagctcaggcccccatgtccagttctgtccccactgtcctcaaccctgtcctgaaaattctactgctttgatggctggggccagtctcttgtcactttggaaactgaggacgcgtggattctactcaagcctccaagtagtggcatatcagtcttggagctcctagctggtgatacggagagggctttggaggacttgggacagcagggccaatttttttgcccaagtgcctaggctgctaactcactgactagaacttaatctggtactttacagttttgcaccaactctgccaagccactggatcttacattaaacatcatactcaaaccagcaaaaaaaa

SEQ ID NO: 2360 - DNA, 5730 bp, Homo sapiens
gagatcaaagggcgtcgcccaaagcgggacaggtccagcggttgttctgtgtgaagtcgcgcggcttccacccacgcagtgttctaagtgaaggccagaaactcgctcgccatgtcggctgcagaggcggggggtgttttccacagagccaggggcaggaccctggccgcgtttcccgcagaaaaggaaagcgaatggaaaggcccattctacttcatcctgggcgcagacccacagtttgggctgatcaaggcctggtccactggggactgtgacaatggcggtgacgaatgggaacaggagatccgtctaactgagcaagccgtccaggccatcaacaagctgaaccccaaacccaaattcttcgttctgtgcggcgacctcatccacgccatgccaggtgtcaaagtcgtgttctcaggccactaccacaggaatgccgggggtacctaccagaacctcgacatggtggtgtcatctgccattggatgccagctgggcagagacccccacgggctccgagtcgtggtggtcaccgccgagaaaattgttcaccgatactacagtctagatgagctgagtgagaaaggaatagaagacgatctcatggatttgatcaagaaaaaatgacgctccttcccgttcccgttcacttttcacttgcactatttttttattttgccagaaacagcagctgcacacaacctcttgctgaaatataaaaatagcccaggcaggtttgtgaatttatgtccttttgcataaatcagagagctggggccctgtcctgaattatattcaaaatagaactgcatttcctttaaaatggagcgaatgatcctggaaatcagtttttaaaatattagactatctctgcatggatgtttgaataaattctcctaatgctgtgtttctcaactccacttttgaattggattgtattctggttagcatatggtcaaagtctgcctatcgacctcaattccaatctgacagccaagtatgatctttgataattccttaaacaaactacacctgattgtattaaattgtggtcacgattcccaaaacgctaggcaaaacaaagttcatctcctttcctttccagcggaacgaacagctgtctgccttgttgtgagagccatgcagacttattttgacaaggagccaagtaggcaccatttactgttcaattctgagacttctgatgataggaacagaatgcagttgatacagctcggagcttaaatttgccttcctgggtgcctagaaaagtcacctttgcacataaattggccatttctgaaaatctcctccaagagactgaaaccaaagctctaaaacgccgcttcttcagtctctggggagcacgttgagttggttcacatccacattctggctgtgtagccactccacagatgggtggtctcttgggatcagaatgcccctccactcatgagactcttcattttgtccactttgacaggaaaagtgggaatgtatgcagagctctcaaaagaaacaaaaaaggccaaaacggtgccttcagccacatcctctgaattggccctgacttggactaaatgcactaatgcaaaatcccttgacaaaagcgcataggttatttcaaaccagcattgttttttatgtaacctgttttaccgcatcttctcagcagcttctgaccactgctcaattttctcctttacagccattgttctggtggacaaataacctaggtactccaaatcctggcaggaaaaatatacagcattatgaaacagcactcagtaatcctaaaatgatttccaaagctggttacacatgacctgcaaagtctattaaattaaaagactttctcattacagagtttagtcaacgtagcaaaaccatgggaaattaaatggaaagataattaaatatgtaaattcataaggaacaaaagacgagaagttaattatacaataggctggtgacaccagagttcattgttatgtgccacaagaaaattaaattttttaaaaaactagaacgctcttcttttagtgttttgctgaaatcctgttttgtatttgtttctttacaacaggtgtaggtataggaggtcaagaaaaggagttcggtaaagggcatagctaataacaaccacacattgggccaggcacagtggcttacgcctgtaatcccagcactttgggaggctgagacgggcagatcacctgagatcaggagtttgagaacagcctggccaacatggtgaaactccatctctactaaaaatacaaaaattagccaggcatgctggtgcacacctgtaatcccagctactcgggaggctgaggcaggagatcgctggaactcaggaggcagaggttgcagtgagccaagatcatgccactgcactccagcctgggcaacagagcaagactctgtctcaaaaaaaaaaaaaaaaaaccacacacacacacattgagacttgagatgtggtgacacttggatcataaacagagggcttcgattccaggatgggggttcctccagggggaaatgaaaaggagctctcactctgttcttacgtatgcacaatgctctgaattgtggcacatgggtttgcagaaggataatggagataattgaaagtaatgaaaatgaaaccaaatctccttccccaaaaacttaaaagaactgattcaaaagtaccccaagaatatgcaaagaaaagggaatcacatcaacagatgattggataaagaacatgtggtatgtatacataatggaatactattcagccactaaaaagaatgaaaccatgtcttttgcagcaacctggatggaactggaggctgttatcttaagtgaaataacttagaagtagaaagtcgaatacttcatgttctcactcataaatgggagctacataaagtgtacccatgaacatagagtgtggaacaaacattggagactcagaagggtgggaggagggtaagggatgagaaagtacctgatgggtacagtgtacacttttctggtgttggttgcaggaaaagcctggacttcaccacttcgcaatatatccgtgtaacaaaactgcacttgtacgccttatatttatacaaatttaattttttaaaagggaagagagaatcatattaatttctcaccactttttaagtaagcaaacagcagtatttcccagaggcaagaggttcagcaagaagtcaggaaatgtttttgtagataagcatctatcattctgatgggccatgactagtgtgttcacttgtaattcctttgcctttaaaaaaagagaatgatatcaaaaaataagtgccttatactgtgaaaaacgataaaaggacttcctgattctaagtgctatggttttgaatgtttattatgtgttttaagtgctttggctcagaaaggtgggggtcacgtggccaaggtcgcctaactcatcttggtggagaaagaacggatgtagatggcccaaggcttgagtccatgctccataacactgtcctgtcttggaaaacgtttctcagaggtgaaaggttgcaccagctcagccagtggcaacacactgagtacggtattcagcaccttggacagcgttagctggaggcccagggatttcctcccagctctgcaaagcctagaccagaccctgattgcaccaggttcagggggcagaagcttgtccaaagagcagatggttccagggggaggatttttactgggggagatttagaaaccgaactgaaccataatgagtcacgggacacagccctgtctgcagcagtaactgtccgcagctctagctgctccatgtctggagttaccaccacagggtgtaggaaaccaccagctgtctcaaggcaaggaatgtcacctaatgctcccctttccaattaatcactttaattggaggaaaaaacaaaaacacaaggacatgttacgggggaaggttttttaaagtgatctcaaattggattgcaaaggctcaagtgactttgggaatggggctggggagatgatcatttactttttacaataaataattttatctcacatctttagtcaagtttctcctaagtttggggagaatggggaaaaaatgtagtaagctttatgggactagcaacagaacgttttatcctattttgtgattttcagtattaagagattattgatcacttgcagagttacaaggcaagcactagtttaaatctgaattagactagggccattgaccttatatacctgtaaaagacactacggtgtatacaactgtagaaacaatatacacatagtagtttaatattacagtctgtattccaatgcagaatcttttgagaaaaggttgccaaaacatcatttgcatttacttgaacccttttttagacagaatcttgctctatcacccaggctggagtgcagtggtgtgatcacagctcactgcagccttgaactcttgggctcaaccaaccttcccacctcagcctcccaaattagctgggactataggctcgtgtcaccacatctaattttttatttttatatttgtggagttgaaggtcttgctctgttacccaggctggtcttgaactcctggccccaagcagtccttccaccttggcctcccaaagtgttgggattacaggcgttggccactgtacccagccttacttgaactcttaatacttattcccaagtggtacctaaaatggttttgtgcagtcacaatattaggtagcaatattatattgagctggaggaaaaagaagatttaggagtaaattgccaaggcaagttctgttaaaagctttctgtaatagacatcagggattttttttattcaggtaacctcaacagttttgattgcacatgtaacatagtacttgacaggtaatactgatttttataacttcataaaatattctcaagccatggaggagctcttatgtattttttaatgagtacacacacacacacacacacacacacacacacacacatatagtaaaagtggaggattcttttcttggaataatgatttctagcatttatctagaaaagattttgctgactaaattttccttttcctccagtggatttttaaacatcagtgcatgcacataaatacagattggatttttcctttaggctttatctatgtaaatgaagtcgattaaatgtgaataatcatgttacccttcattattctgaccattatgtttgagaagtagatttcttcactaaaggggctttgcagcacacttagaatgagtgagccactgtgcctctctagaaactggcttcttgtcatcatttcaacatccactcaaacgctcacccctgaaagtggccttcctgcttgatatggtttggctctgtgtctccacccaaattggtttggctctgtgtccccactgaaatctcatctcgaattgtaatccccataatccccatgtgtcaagggacggacctggtgggaggtaattggatcatggaggcagtttctcccatgctattcttgtgatagtgagttctcatgacactgatggttttgtgtttgatagctccttcacactctttctttcctgttgccatgtaagacatgcctgcttccccttccaccaggattgtaagtttcctgaggcctccccagccatgcggaactgtgagtctattaaatctcttttctttgtaaattaaaaaaaaaaaaaa

SEQ ID NO: 2361 - DNA, 1372 bp, Homo sapiens
gtcttcaggtcccaatcctccgcttccgcgcttgcgcgccaagacggctcggatgccggcggtctctgctgaagagagaagatggcgcttgacggaccagagcagatggagctggaggaggggaaggcaggcagcggactccgccaatattatctgtccaagattgaagaactccagctgattgtgaatgataagagccaaaacctccggaggctgcaggcacagaggaacgaactaaatgctaaagttcgcctattgcgggaggagctacagctgctgcaggagcagggctcctatgtgggggaagtagtccgggccatggataagaagaaagtgttggtcaaggtacatcctgaaggtaaatttgttgtagacgtggacaaaaacattgacatcaatgatgtgacacccaattgccgggtggctctaaggaatgacagctacactctgcacaagatcctgcccaacaaggtagacccattagtgtcactgatgatggtggagaaagtaccagattcaacttatgagatgattggtggactggacaaacagatcaaggagatcaaagaagtgatcgagctgcctgttaagcatcctgagctcttcgaagcactgggcattgctcagcccaagggagtgctgctgtatggacctccaggcactgggaagacactgttggcccgggctgtggctcatcatacggactgtacctttattcgtgtctctggctctgaactggtacagaaattcataggggaaggggcaagaatggtgagggagctgtttgtcatggcacgggaacatgctccatctatcatcttcatggacgaaatcgactccatcggctcctcgcggctggaggggggttctggaggggacagtgaagtgcagcgcacgatgctggagttgctcaaccagctcgacggctttgaggccaccaagaacatcaaggttatcatggctactaataggattgatatcctggactcggcactgcttcgcccagggcgcattgacagaaaaattgaattcccaccccccaatgaggaggcccggctggacattttgaagattcattctcggaagatgaacctgacccgggggatcaacctgagaaaaattgctgagctcatgccaggagcatcaggggctgaagtgaagggcgtgtgcacagaagctggcatgtatgccctgcgagaacggcgagtccatgtcactcaggaggactttgagatggcagtagccaaggtcatgcagaaggacagtgagaaaaacatgtccatcaagaaattatggaagtgagtggacagcctttgtgtgtatctctccaataaagctctgtgggccaagtcctctaggaaaaaaaaaaaaa

SEQ ID NO: 2362 - DNA, 3473 bp, Homo sapiens
gtcgcgggaggggcttccgccgcgagggggcggggccggccctcagagtcctctgacggccccagtcagggaatttcaatttgaaacctagcggagggaggaggcaggcgcggctgccggcggctgggactgaagagggacgggtcccgcggcgagcgagctcctgagcataagctgtggccatgactactgaagtaggctctgtgtctgaagtgaagaaggactctagccagttaggaacagatgcaaccaaggaaaaacctaaagaagtagcagaaaatcagcagaatcagtcttccgatccagaggaggaaaaaggttcccagccacctcctgcagctgaaagccaaagtagtctacgccgccagaagagagagaaggaaacatcggagagcaggggtatttctcggttcataccgccatggcttaagaagcaaaagtcatataccttagtagtggccaaagatggaggagataaaaaagagcctacccaagctgttgttgaagaacaggtcttagataaagaggaaccccttccagaagaacagagacaggctaagggtgatgctgaagaaatggctcagaagaaacaagagattaaagttgaagtcaaggaagaaaaaccctcagtgagcaaggaagaaaaaccctcagtgagcaaagtggagatgcagcctactgaattagtaagtaaggagagagaagagaaggtaaaagaaacacaggaagacaaattagaaggaggagcagcaaaaagggagaccaaggaagtgcagaccaatgagctgaaagcagagaaggcatctcaaaaagtcaccaagaagaccaaaactgtccagtgtaaagtgaccctcttagatggcaccgaatacagctgtgacctggagaaacatgccaagggacaagtgttatttgacaaagtgtgtgaacacctcaatctcttggagaaagactactttggacttttgtttcaggaaagccctgagcagaaaaactggttagatcctgctaaagaaataaagagacaactgagaaaccttccatggctattcacttttaatgtgaagttttatcctcctgatccttctcaattgactgaagatatcaccagatacttcttgtgccttcagctccggcaggacattgcctctggccgcctgccctgctcttttgtgactcatgctctcctgggatcctacaccctgcaggctgaacttggtgactatgacccagaagaacatggcagcatcgacctcagtgaattccagtttgcccctactcagactaaggagctggaagagaaggtggcagagctgcacaaaacccacaggggcttatcgccagcacaagctgattcccagttcttagaaaatgcaaagaggctttccatgtatggtgttgacctacatcatgccaaggactcagaaggtgtggacatcaagctgggcgtgtgtgctaatggacttctcatttacaaagacagactgcgaatcaatcgttttgcttggccgaaaatcttaaaaatttcctataaacgcagtaacttctacattaaagtcagaccggcagagctggaacagtttgagagtaccattggattcaaactgccaaaccaccgggcagcgaaaagactatggaaagtgtgcgtggagcatcatactttctacaggcttgtttctccagagcagccaccaaaagccaagttcctgaccttggggtccaaatttcgctatagtggccgcacccaagcacagacccgccaggccagcaccctcatagataggccagcaccacactttgagcgcacttctagtaaacgggtctccaggagtctagatggagctccgattggtgtcatggaccaaagtcttatgaaggattttcctggcgctgctggggagatttcagcctatggacctggacttgtcagcattgccgtggtacaagatggggacggcaggagggaagtgagaagcccaactaaagccccacatttgcagctcattgaaggaaagactgtaaaaggtggaatttctgaaacaagaattgagaaacgcattgtgatcacaggagatggagatattgatcatgaccaggcactggctcaggcgatcagggaagccagagagcagcaccctgacatgtcggtcacaagagtggtggtacacaaagaaacagagttggctgaggaaggggaagattaagtaagaaagtcattttttaaacaacactcaactttgtgaacccctgaagattttttgaccgttccaagtcttaatgccacaccactattccagcgaatttatgctacaactggtaacaatgaccagaagcctgaagaattaaaatgccaacaccaaacctttccttaccagctctggtctatattgctcccatgcatttaatatattattttgttttataaccacttctaaatattctcagttctttctttttgttgttgttaattaaggggttttggttttgttttctgtttactttgtgtgcaactacctgcttttaatgactcactttgatcaaatgacagtgaacaaagccagcccaagctggtaaggtgctgttcacttgaacaggtgctgttgcgcagaaaggaaactctgtgactaatttagatagtggctttccttcttctggattcttttcattgaattctcacagtaaatatttacggagttttcaaattgcagcaaatatactgtatgagaaaatattaatacagattaaaagcctttcttacatcttgaaaattttctaatatttgagaatttcacagggatgttttttatattggacccttttgactttccagtcctgtgactttctacttttagtagagagtcagaatctctggactggagaataatgaagaagttcactgactgtgcactgtgcttagagaccctgccgcaccacagtgccaatgcttgtcagacacatgcccttcggcagcattccagaacaggagggaagagaaagagaaaactttcttcccttctactaaaagattcaggcagcttaaaaccttagtgctttctttcttaacatacccacatttcaattctttccattatttgaacacttgggtagaactcttgctttgtattaaacctctttgtctacacatgtaaaacttaccttttgttattgagcaggcctatctctttcagatagttttatgattcacacaggtttgaggatgctggggagagggggagggggctgtggtggtgttctgttggttacaagaaagttataccatttaaagctggcaccagagacccgatagggacttattaactatattgaacattttttcctttgcctttgaccctatgtatagttacgatgccagattagatttatagcagcctcaagttgtattaaatgatattttgcttcctgtaatactattataaaataaagtttgtttattctctaaaaaaaaaaaaaaa

SEQ ID NO: 2363 - DNA, 5980 bp, Homo sapiens
gaccgcgcgcggctagccgctggggaagcgactctgagtcccgggctcggagcgcaggctcagctccgcgctgcgagcgctacgggcgcaggggcggggagccggcccggagcgcagtttccagtggggccggggtttcacccgggccctctctgtttgaaccgaacccgacaaatgggcgcatgacgatggagagcagggaaatggactgctatctccgtcgcctcaaacaggagctgatgtccatgaaggaggtgggtgatggcttacaggatcagatgaactgcatgatgggtgcactgcaagaactgaagctcctccaggtgcagacagcactggaacagctggagatctctggagggggtcctgtgccaggcagccctgaaggtcccaggacccagtgcgagcacccttgttgggagggtggcagaggtcctgccaggcccacagtctgttccccctccagtcaaccttctcttggcagcagcaccaagtttccatcccataggagtgtctgtggaagggatttagcccccttgcccaggacacagccacatcaaagctgtgctcagcaggggccagagcgagtggaaccggatgactggacctccacgttgatgtcccggggccggaatcgacagcctctggtgttaggggacaacgtttttgcagacctggtgggcaattggctagacttgccagaactggagaagggtggggagaagggtgagactgggggggcacgtgaacccaaaggagagaaaggccagccccaggagctgggccgcaggttcgccctgacagcaaacatctttaagaagttcttgcgtagtgtgcggcctgaccgtgaccggctgctgaaggagaagccaggctgggtgacacccatggtccctgagtcccgaaccggccgctcacagaaggtcaagaagcggagcctttccaagggctctggacatttccccttcccaggcaccggggagcacaggcgaggggagaatccccccacaagctgccccaaggccctggagcactcaccctcaggatttgatattaacacagctgtttgggtctgaatcctagagacagaaagttgactgagcctgaaagggccaggtcccagtgctgggcccctggggaggagggagggtgggcggtatggctctcgaaagcccaactccaagttcctttcccccagaaagcggggagaagccagagttcttggctcaggactgaagggaaggtggttgggagaggctgtcttgggggctagctggtggaggaggtaagagtagctggagagtgagctgtgcgtgtgtgtgtgtgtgtgtgcatgtgtgtgtctgtctggcatgcatgcactcactttggggctggaggtgacagtaggtgagggcagaggaggagatcagaaaatccctctgacatctccactgcccccaaagacctccgttgaacattctgtatggaaaagagccctggagcatcaggttccccagataggcccccaaataaagacctgtctatggctctcccaaccttctgtcagcttctttggcaagacattgctccaggcacagggactgaaccccaggcctcctgggactggagcagcagtgaggcaaaacccgacctgctagccctttctgccttggaggtttcagtccatacctggactctgagaaaatgagctgaataaggagtacagtgtgtaaggagcagccagggaagccctagacactccccgcgtctcccccatgcacaggggaaggatgttgacatagcactgggctgtttgaatgccttttcatctccatggtctcatttgaaagtgagcgaggcaggcaggcatgatcccattttccagataaggaaacaagcctagatatgctacatgtccaggaacaactgcagccaggaggcagaacagcctaggtctaactgcagagtagaagctggaccctggagttaccaacactcctccccaacagttcttagcaccccgcaggctgggcgctgtggctcacgcctgtaatcccagcactttgggagggcaaggcaggcggattacctggggtcaggagttcatgaccagcctggccaacatggtgaaaccccgtctctactaaaaaaatacgtaaaaattagccaggcgtggtggcacacgcctgtaaacccagctacttgggaggctgaggcaggagaattgcttgagcccgggagagggaggttgcagtgaggcgagatcatgccactgcactccagcctggctgacagagcaagactcccctgtctcaaaaaaaataaaaaaaaacagttcgtagggccccataccccacaacccctgtctcctgcacttaactcccacctgggtcagagaacagccaattcaccagtgaggtagaagtgaacccagaagaaatagccacttgattttaaaattcccagctccattccgtggccttctccccactagacacagcagtcccaggcctcctgttccctcctcacctagaggcagccgggacggagggggaagggccaggcagcagctcagctccggcttctctaaagccactctgggcacgtggcccaggagggccacctagtgatccaggcccccccccaggactgccctgggaagccactgtccctcccactccagtagggaacactcactggctgggaaaagacaatgtggatcttcttttgggctgaccaagccaggagggcacaccctcccactgcccctctctgcctcccactgattgtccctcagcctgatggggtgtgacagctgcaattagaggcaggattccttcccaccctcaaagcattaatagccagttggagaggcaaaatagtaagaaaaggctcttctgcttgcttcctggatccctggggagagtggagagaggggcagagctcaagatgggattatgggggcgcagccgcggtggttagggtcactctcaaatcctacccagtcaaatggtaagatgtttcatttttggtgggggagctgcaggagggaggaaggcgctcatgctttttgggttttgttgagcactcactgtctgtcaggtaatgtgcacatctctcaaacttagaaggaccctagaaggcattgttctccagacacatctatggaggttattagggggcgtgtaaactgccccgattaggctgctagcaaaggaaaggacagagatttgaacagagggttgggttatctggctccaaaacccctgtccttttcttgctatttctctacctggagtttgccaactgagcaagcccactctggtggagccagccactgcaaatcctttgtgtcttcccagagaataccaacatttcagttttgagtgagggaacgttggctctgactgcctttggaggtggagatggtggaggtggtggtggtggtggtggtagtggtggtgtgtgtgtgtgtgtgtgtgtgtgtgtgtgtgtgcctgcgcgtgctaagaaactgcatgttaagattccacctactgaatcatgagcggaggaagtcgtgggacactggctggtggagaagccatctagcatattattcaagatgacaccagctccaagtctggaatgagtctgtgggaaaccaaggtacttcttggacattcacctataactcacgtgtttcgtggactggtcacagtggttcggataaattgaacagaactttatgaacacctcccagcaccaggtgttgttatagaaactaagaacagagcaatgagaaggacccaactcctgctctcaaatggatgcagtggaaaataagcagactttgaaccattggttagtcagaagagacttgggagactgaaaacttgtttcaacttgggccagaacaaaaaattaggaagcaacacttgctgccaacatgatttacaagtgccagcaccttcacctctgttacttccttctcactacacactgaaagcagttgctcttgttttacatggacaggctcagagaagttaagcaacttgtccaaggtcacacagtagtggaattgagattgaatcagttccaactgacttgcaatcttgtgcttttcagacgatcccactaattgtccatatctgttccaaagccaaatcaagaggaacaagagcaaaatctgtcctctcatattattcatggtcctgcgtggatcataaatggcatgctgactgtctgatggagacttacttttcccttccccctggacacctgccatggcaatgacagaggctgtattttactgaagtggagggaagaggtgaatgcaaatgcctagggcctaagtatacaggaaggtgtagggagaggtaagcagtgtgtatgtggaggagatagcagacgtaagcagagagaaatcagagagcttagttcttcctctggggcgcactttgtggttaattaggacatgcaaatgagctagaagctcatttaatatcctccctgacatgtagccccaccccaccctgccccacttccctggcaggtacaagggccacctgattggcccaggtatctgtggaaggttccacctgcttctttgtggcccagggaacagaaaagagtccctgctgggcatgctagtggggccggcctggtctccctcctccctttctcttcccaacctttcagacttgggacctctcttttccctctccctcagacacttcccttgtgccccgcccctcagggtgatctctgaacccaaacttgccccaaagaaggttgctctgtcctctccacatccccatctcctccctagggccttgttggggagaggctcctccatctttcccaagtcacaccatcgtttcctacgtggtctggacaagagcaagagcacaccttgtccccaccttctccagagcagccagaacccacctcaggtgccttccccatccggtgcagttaaggcacttctgccagcaccatggtatgagcactagacttggagttaagatttgagagccccctctgtcactgtggaagcttgagcatgttgcttgatctctctgaaccttgtgtttctcatctgtgaaaggtgataatgtggggctgctgtgagatttaaaggacataatgcacctacggtccaagcactgcctggaatacagcagaagctcagcagatactggacaacccatccccttagtagaggcactaaccatgtgacccaaggcaaaagtgcttaagaaaaagtgctttctctgagcgttggtctcttcttctgtcgaaacatttatattgatttaatatctcacaggattgtagcaagggtcagagaagacaataggtgacatgtttttgtacactgtatactagccacccagatgggctgttatttgctaaatggcaaatttacactgttccccaaaggatgacatgcactggggaggcggggggtgtggaggtggagaaaggctgagcttggagaaaaggtgcttgaggaccccactgcctaaggacctgctctaggaaacattcccactccctacaccctagctgcccctcacagtcaacccttaaggacctcaaattcttggcaaggggtaaagagttgaaagtgccaagtcctagtggttttgagaagcctctggtctgctctttctgctctgtaaagtcttagttgccagagtcccctatagcccccacatcgctcccttcctcctgccctccggccaccctggaaactaatggcctaaaggtgctgtggctgtcctcctaaaatccattccctcctgatggggtggaggaatctgtgaagcccaccttcaggagaggtctcggggctcgggctggtgctgccagagaaagggtgactgaaccagaaaggcctaggggaaagcagctcaaactgcagccatccccttagtacgattactaggatgtcccttgccttccttttgcctcctccacccaacccctaaaataaacagtatgatgaaacctc

SEQ ID NO: 2364 - DNA, 4161 bp, Homo sapiens
agtctcaccggtccgcccggccgcgcggcgtgagctccccggacatcgcgtctcgggatgctgcaagccagcgcggccgctcgcgcgcagccccgcacctccgcccctgcctctgcctcctgggccatgccctgctgtttacatgccggtgaggtccccggccgctccgaacccctccgagccccggctccccgagggtgaagcccgccggcccgcgaactggactggtggatctctcagacctggggccccggactccgatctccgccgtctccgccaccatcagggcgggatccggctctggtgttttgaggagggggtgtggtgtagggaaaggaatcccgtccctctccaccttttttcgccttcggggcttcagactcagggaactcgctcatggctttcttgatgaagaagaagaaattcaaattccaaactactttcaccctggaggagctgactgcggttcccttcgtgaacggggtcctcttctgcaaggtccggctgctggatggaggggattttgtcagcttgtcgtcaagggaggaggtacaggagaactgtgtgcggtggcgaaagaggttcaccttcgtgtgtaagatgagtgctaacccggccaccggcctgctggacccctgtgtcttccgtgtgtctgtgcgcaaggagctgaaaggcgggaaggcttattccaagctgggcttcgctgacttgaacctggccgagtttgcgggctcgggctccacggtgcgctgctgcctgctcgagggatatgacacgaagaacactcgccaggacaactccatccttaaggtcaccattggtatgttcctgctctctggagatccctgcttcaagacgccaccatcgactgccaagtccatctccatcccaggccaggattcctccctgcagctgacgtgtaagggtggtgggaccagcagtgggggcagcagcaccaactccctgactgggtcccggccccccaaggctcggcccactattctcagctcagggctgccagaggaacccgaccagaacctgtccagccctgaggaggtgttccactctggccactcccgcaactccagctatgccagccagcagtccaagatctccggctacagcacagagcactcgcgctcctccagcctctcagacctgacgcaccgccgcaacacgtccaccagcagcagcgcctctgggggccttggcatgaccgtggagggccctgagggcagtgagcgggagcaccggcccccggagaagccgccgcggccaccccggcccctgcatctgtccgatcgctctttcaggcggaagaaggactcggtggagagccacccgacctgggtggacgacacgcggatcgatgcggatgccatcgtggagaagatcgtgcagagccaggatttcacagatggcagcaacaccgaggacagcaacctccggctgttcgtgagccgcgatggctctgccacgctgagcggcatccagcttgccaccagggtctcttctggggtctacgagccagttgtgattgaaagccattgaggagcaggtgtccgggctggagaagagtcctgctttctctggagtccagacctgtatcattccatgaggaactttccccttcagatcacctctgcgccacatctcatccatgcctcctccatgcactccagtccacactccccgtagcatcattccattgcccctcccatccatgctgggaccctcctggcccaccaaggcccaggcaccactgtgaatattctcctctgaaccactagagggcaggccaggcaggccaggcgggcccgtgcagcttgtgggcaagaaggagctggcaaggaccggcgctgctggagactgacccagccctctggctgaggacatgcagcggctcctaaatgtagagatgcctgtggctgagggggcctctctacctgtgtccccactcactccaggagcactggctttggtcacgtcttagcagcagggccttgctccgttgttcccttgccctggtggtgggggggccagaccacctccggaatcctgccacctgtgactgtctgactgcttagtgcttcagctgtcccttccttgtgtcctgggggacctgctggcggcctcttcctgggagccatgacctcagaccccacccacactccagatcgagacccctgcctccccccggcaaatgtcctcccgctgccttgcagcctgcactttgcacatgctcacccccagcacagtcccactggcccctcacctccccttccctgagctccttcccaaggactcctggtcactgcctgctgtgcagtcagaggcccagggtccagcagcccggcgggaacgggtgctgcctcttcctccagttagctccagctcaggtctgagacccgtgctgagaaaggtctgagcaccgaccgtgccctctgcccagggctgggtcctgagcagctggttttcctgcaggaaggttggagcaagcaaagtccttctctgccctcagggtcagctgcccagactggggcggatgccagagaggcaggtgggctgtggctggactggtccggagctggcttccttaccagaaaagcctcagccttcctctggaagcatcccccgttctgggcaagggggaagggctcctttaaggggtgtgctttcccagtggggagcagtctggccctgccccctactaaagcctctgctctcagcactttcccccaagtccttgtaacttgcttgaaggtgggttctggctgccagccagtccctggacaaactctcctgccccttttaaatttcactcattttgtataaacccagcaggctggtgtttacttagccctgtagcttttttcattttttctttccgtctttcttcttgagttcacggttcaatattgcctcctcgccctggtgaggggaggtgctgcttttctgccccacctgccggctggttccagcagcgctggggcccagctggggggccgggatgggggcttctctctctgggaggggtgcaggtgccctccccaggctgggagggttccttccctagctccccatctgcccccgctggtgagagttgggcttcttggtcttggaactccctggcattgggaacagagcatttccagcatttgttgttgttttactcacctaacccttagaaaatgaatgttagaaggtgcctgccgaggcgggacagagtgttcgctcgcgctggagaaggctctgctcagccctgagagtcccttcctgccccaccgatactggcactttaaaaaggaagctgaccgcacagtgtccagacgaattggcccccagaagatggggagttctgtcctgcccttctgtgtctgcgtgacctcacccagcctaggagggaggtgcattcagggtagatttgcctctcattcaaagttctggggctttgggtggaaaacagccagctttggcgctgttggggagactcctccagaccaggaaccccagaaggagacagagcctgccacatcctcccacgccaggccctgggccagggtgattggactgagaatttggccacaaccaaattgatgctggctggaaccagaggccagaaagcctggccttgtccccatgtgggagccctgtcctcagccctcttgtccccttgagctcagtgaattcccaccaggtgcccacagctcctggacttcaaattctatatattgagagagttggagagtatatcagagatatttttggaaaggagttggtctatgcaatgtcagtttggaatcttcttgaaagtttaatgtttttattaggagatttaaagaaaataaaggtctacaatatctttaggttttttttttttcctgtttaccgcacaaactgaccacatggcatgtctatcaggatggagggtgtccatgttctcctctgtctttagggaggtgataaggagatgggcggaggggtgtttttttctttgactcccctcctttctaacagaatgttgccaccactgcttgagtgggctgtgtttgttcctctgtcccagcttctgttgtagaaaataacattgttaggggaactcaggctagtgtcagcgtcttggtttggggagaaaaaattaaatgtttcggtttttgtttc

SEQ ID NO: 2365 - DNA, 7620 bp, Homo sapiens
gtcattgagctgatgtgcttttgcaaggggtctctttagaagtggtaggggcagggtcgagagaagaaggggatgcagaatctgtacatgaggaaggagccagagtcactcaggaaactcctcattcttcctgcgctggctgtggcacacccaccggtggcacacccctccctcgggtccagttcagcccacagactcctgggaggagagccagggccccagcctctcctttgaggagtgttgcagcctttctgtgtgccagatgcctagtgaagaaaagctgaaaccctggagctttgtgcatgttaatgaccttggaaatgactgagctcacggaccctcatcacaccatgggagactacaaagtggcccaccctcaggaccctcaccacccatcagagaagcctgtcattcactgccataaatgtggggagccttgcaagggtgaagtgcttcgggtccagaccaaacatttccacatcaagtgtttcacctgcaaagtgtgtggctgtgacctggcacaagggggcttcttcataaagaacggagagtatctctgcaccctggactaccagcggatgtacgggacacgctgccatggctgtggggagttcgtggagggcgaagtggtgactgctctgggcaagacctaccatcccaattgctttgcttgtactatctgcaagcgcccgtttccacccggagaccgagtcacattcaatgggagagactgcctttgtcaactctgtgcacagccgatgtcgtccagtccgaaagaaaccaccttctccagcaattgtgccggctgcggaagagatatcaagaatgggcaggcgctgctggcgctggataagcagtggcacttggggtgctttaaatgcaagtcctgcgggaaggtcctcaccggggagtacatcagcaaggatggtgctccgtactgtgaaaaggactaccagggactctttggggtgaaatgtgaggcgtgtcaccagtttatcacagggaaagtcctggaggcaggtgacaaacattaccaccccagctgtgcacgatgcagcagatgcaaccagatgttcacagaaggagaggaaatgtatcttcaaggctccaccgtttggcatcccgactgtaagcaatctacgaagaccgaggaaaagctgcggcctaccaggacatcctcggaaagtatttattctaggccaggctccagtattcctggctcaccaggtcatactatctatgcaaaagtagacaatgagatcctggattacaaggatttagcagccattccgaaggtcaaggcaatttatgacattgaacgtccagatcttattacctatgagcctttctacacttcgggctatgatgacaaacaggagagacagagccttggagagtctccgaggactttgtctcctactccatcagcagaagggtaccaggatgttcgggatcggatgatccatcggtccacgagccagggctccatcaactcccctgtgtacagccgccacagctacactccaaccacgtcccgctctccccagcatttccacagacctggcaatgagccgtccagcggccggaactcccctctcccttaccggccagacagccgccctctaactccaacttacgctcaggcccctaaacatttccatgttccagatcaaggaatcaacatttaccgaaagccacccatctacaaacagcatgctgccttggcagcccagagcaagtcctcagaagatatcatcaagttttccaagttcccagcagcccaggcaccagaccccagcgagacaccaaagattgagacggaccactggcctggtcccccctcatttgctgtcgtaggacctgacatgaaacgcagatctagtggcagagaggaagatgatgaggaacttctgagacgtcggcagcttcaagaagagcaattaatgaagcttaactcaggcctgggacagttgatcttgaaagaagagatggagaaagagagccgggaaaggtcatctctgttagccagtcgctacgattctcccatcaactcagcttcacatattccatcatctaaaactgcatctctccctggctatggaagaaatgggcttcaccggcctgtttctaccgacttcgctcagtataacagctatggggatgtcagcgggggagtgcgagattaccagacactcccagatggccacatgcctgcaatgagaatggaccgaggagtgtctatgcccaacatgttggaaccaaagatatttccatatgaaatgctcatggtgaccaacagagggcgaaacaaaatcctcagagaggtggacagaaccaggctggagcgccacttagcccctgaagtgtttcgggaaatctttggaatgtccatacaggagtttgacaggttacctctttggagacgcaacgacatgaagaaaaaagcaaaactcttctaagtcccactcgtgaatggcaattagagaaaggactgacagtggcggtgccccataggatgtcatattgaggcccaaacttgattggagaatttgcaaactaccgtcgctcagcaacaccaaaaagagaaagtctggttaaaacaccatgagtcaaatgtcgggccagccaacagtaacacttgccaagaagcatggcgtagaaatttctatgttccgaaacacagagtagtgtccacatgtgagcttttcacattaccttatgtatacaacaggagctgcgttgttttcttctttttcttttcctttatctgttgtccaacaacagtgctgactgtccggataagagctggcaagtgcccttaggatgccgcatgggaaaaatcggttatcataatttcaaagtataaatatatttattaagtagcgctgcggctaagaaggaagagtgaggggtctgtccatggggtggcagtgatttcacacccgcctttcttgaatggcttcgtgttactcagccgtgccctggcaggaatggaactccatcagggaacagggcagctctgtttgaatggggtgaaaaacagcaaaattaattcttagcaagctccttgttctctactgttcaccgggacctggctggcaaatgacttagctattagtatatttaaaaactgttcaaaagcaaaagagaaggaacaggaatgaaaggaaaccttcccttaactctttctgcttcccatagcaggtctggttcctgctccccgcctaggacaggagctgtctggagctccacctttgcaaagaaaggaaaaacacaaattgcccccagattggcccagtggcatgccattaggtgattttgcataggggccatatcattcatggccaaaaaaaaccaaaaagcaaaaaacaaaaacaagtcccatgtcctactgactctagttcttccagtcgttatcctctgctgtctctctggcatcctatgaatcagatcaagcccatgctgttgttggtttttaaggtttctttcaataataggctaaggaaagacatgtttttctcttttaaatctctgcaactccaaagtagactccttcgaacgtatttaatttggccttttcagctttcttcttgcccagctctgtcgaattcatgggtgtgtgtgcacatgttggtttcactcacccagagtaattttgtgagcatgcatgtgctttttaatttctgcttgaatgtttgtcctgctgtgttgcagcttctaaagacattgtcaccgagtgtgtgtgactcaaagatcaagagtgaggctaaactgcgaccccaacatcacttccttcatggaaaggtgttggcgctgatgtagctcatggaaggatcagactgggaaccacagaggaaggatgaggtgggatgtggaggtcagagcatctcacgagagtccctcaggctctgcaacactagattcgaatatgagcctagggtttccccaacacgtgcgtgcatatgaaaccacatcatgattcccgacgtgagttagatgagggagagtttgtgtaactccacacccaggagggtaagccactttattatcatgctttggggctgtgcttaagaatttaagctctgttttaaagccgaagaagaaaacatttgaatttaccttcatatgccactaagaacaaaagctctgaagttcttcctgctggcaccaaatattaggattacaagctgtctctctgacaccagtggtaaaaaagcaagtagaatagtttctgagtctgtgttgcagcctctgacacgtggctcaccgctgtcatttgggggatggaatgaacagtcactgttctatagcatcctcctgtgctcttacctaaggaatctaaattgtcctagccttccattgctatgcactgaatgaggactactctcgtgtgtgtgtgtgtgtgtgtgtgtgtgtgtgtgtgtgtgtgtgtgtgtgttggatctactaacatgtttagcaaatggctctgacagggtggccatgagcagatgagaccagctcttgcttggttggaagccacactgcagtttgcagtttagcctttggtgtctcagtggcttcttgcttattccatgctttttctatcccatcctctctctgtgccctcctgcaatggcagccttggcacaatgcctgggtgtcctcatccttgctttactctggaaagtgtggggatggagaggatggtgcatttccagtgcttccttacctgtcaataacaatggtggccacctgggtcccagcacttggctggtggagagatttttttcattatggagctaataaagggtccctacgttttacattgattaatgaattatcacccagacatgtgcagatgaaatgtcaatataagaaaaatcaaggtatttgggaaacatgggcataatcaggtagttttgctaaaattcctcttccttggtctacataaagaagacatgggtctgtcatagaatggggacattagactgaaaactgggacaacccccttccttattttatagagactaggagttaaggggcctgcctaagattgcagtgataaagaactgaaccctaaatcagctcccactaatgaaaccctgctttccttgtatcttttaaactcagttctgcatccaacttgagaagaaaaaaagcttctttccatatcaagtaccatatgagttcatttaaactgcaccttgcagaaatgcattgccagaaagcaccagtagcctcctatctgcaagcagagtagtgctctgctctggggaggggtcattggaaaccataatgcagagtgggccccctactccatttcccagcaaaaggctccagctggagggatgggttgtggggcaacctggttcctgctaactgccagattgaatgtgtgggctagaatgcctgcacatttagttaaactgggctcagcatgcttgtcctcaaaatgtccatcctggtcacagcacacaagatggctattggtctgcttttaccctaccctgtactatacatgaaaattccagttattaacacactcaaactggtggagcttgttcaccctaggaaggggattgtatatatggcaggcttccctggtgccgatgtaaagggctacatttgggaacatttgacttccttgggactcttaagtgcataatgatggcatgaagtaaaaggggcctcaatgatgataggaaaatcagttcttttaaaatttcttcaagaaaatccaggctatcacatagtctttctgtgtgacttattaggagataggaagagcattgggaaacttgcacagctagctatgcatctacattttggtttggggttagttatgaaatgttcttaatatgacgtgttcaataacttcacataaacttcctgttctccaaaacctcaaagagatagagttaatgagttgttgtttttttttaaatgggggtagttttctatctgtcatgggctctagcatctactccgctacccaattctgtcatctccaagctgagtttcctcttctgaggcagaggctggagcagttctttttcagttctcatcctctccatcccaatccagtatatcaatcaactctaactcggagacgtctagctggcaatgtttctaaaactttcactggatttctttagacattgaagcaaacatttttttctaagaattgcttctcagatgatgatatcaaatgtatatgcttttgcaagtttgaaaagttcaaattaaccacttttgactaggtaagtctttctaaaaaccatttaaagctaactgggtcttagcatcctcctgtgtatggaagagacaggtgaccgctccaggttgggtgctcacagaacccttttcctgactctcatggaagatggtggaaggaaaatagactgtctcatcaaccctcctgtgtcctctgaagcaatctcagtttttattaaccacctcttctgtgtttctggtagctatttaacctgtatttaatctgtacttcctatgccagcctcaattttatttgatttttacaattattctcttctaaccaatgaagtgtttgtcagtatgccccaaagcttgctcttttgtgctcccttttgaataactttctatccagaaaaagagattatttgggacttgagatttgcagtgataccaacttatagcaatgatgtactttaagggaactacccaactatgttgtgatagaagaaagagaaaccttcactttggcatttttttttaatcactgtttatttttctgtttgcggcccaggaagcagtgggaggtggtggcagatatgctttgcatatggattgttatgtttttatttgggcaagtttaatcatggaaaactcaaaaagaaggggggaaatggtcagtttaagccaaaagaaactttctaaacaatgtataggtacacagcaaaattaaacaaatccaacaatttctgaagcttagtgtaattgagtggtggttgttattcaataaaattattcccaaaagtgtttctcctaagagtgcagttcccatgagtcacttcctgaacccattgaccaaaggtggacagagacaatcctgtagaccttgacattcagaaagatgtgagctgcttactgatcatatatgcatacgtttctttacagcagaggaaaccattgtccacaaaactgatgttcttttggggttttatgtacagacttgtccaatcatgtgtgtggttcctgcgagttgctgatgactccgcattgaagctctctgagttctttgattttaagttgggtttatggaattttttcaaatgttggaaggtgtgtggttcttcctgccctccctccccttttggaaatatgaaagcaaatgtttagaagaattccttttgaaaagctgtgtcgtgttccctgtgaaactgagcaggtgtgtgttggcgcgctaagtgccacatgcttgtgtgtagaggaggaggtggccctgccggctccgcgctgctgtgcctgtgatccctacctgctccccgctcctgttgccagcagcactcactgcactcctttgtcatatactctgcatcactgtcatactcacaacttcgtgaataaagttgtgtgctttattcgtagaaaaaaaaaaaa

SEQ ID NO: 2366 - DNA, 2502 bp, Homo sapiens
tattcatcaagtgccctctagctgttaagtcactctgatctctgactgcagctcctactgttggacacacctggccggtgcttcagttagatcaaaccattgctgaaactgaagaggacatgtcaaatattacagatccacagatgtgggattttgatgatctaaatttcactggcatgccacctgcagatgaagattacagcccctgtatgctagaaactgagacactcaacaagtatgttgtgatcatcgcctatgccctagtgttcctgctgagcctgctgggaaactccctggtgatgctggtcatcttatacagcagggtcggccgctccgtcactgatgtctacctgctgaacctggccttggccgacctactctttgccctgaccttgcccatctgggccgcctccaaggtgaatggctggatttttggcacattcctgtgcaaggtggtctcactcctgaaggaagtcaacttctacagtggcatcctgctgttggcctgcatcagtgtggaccgttacctggccattgtccatgccacacgcacactgacccagaagcgtcacttggtcaagtttgtttgtcttggctgctggggactgtctatgaatctgtccctgcccttcttccttttccgccaggcttaccatccaaacaattccagtccagtttgctatgaggtcctgggaaatgacacagcaaaatggcggatggtgttgcggatcctgcctcacacctttggcttcatcgtgccgctgtttgtcatgctgttctgctatggattcaccctgcgtacactgtttaaggcccacatggggcagaagcaccgagccatgagggtcatctttgctgtcgtcctcatcttcctgctttgctggctgccctacaacctggtcctgctggcagacaccctcatgaggacccaggtgatccaggagagctgtgagcgccgcaacaacatcggccgggccctggatgccactgagattctgggatttctccatagctgcctcaaccccatcatctacgccttcatcggccaaaattttcgccatggattcctcaagatcctggctatgcatggcctggtcagcaaggagttcttggcacgtcatcgtgttacctcctacacttcttcgtctgtcaatgtctcttccaacctctgaaaaccatcgatgaaggaatatctcttctcagaaggaaagaataaccaacaccctgaggttgtgtgtggaaggtgatctggctctggacaggcactatctgggttttggggggacgctataggatgtggggaagttaggaactggtgtcttcaggggccacaccaaccttctgaggagctgttgaggtacctccaaggaccggcctttgcacctccatggaaacgaagcaccatcattcccgttgaacgtcacatctttaacccactaactggctaattagcatggccacatctgagccccgaatctgacattagatgagagaacagggctgaagctgtgtcctcatgagggctggatgctctcgttgaccctcacaggagcatctcctcaactctgagtgttaagcgttgagccaccaagctggtggctctgtgtgctctgatccgagctcaggggggtggttttcccatctcaggtgtgttgcagtgtctgctggagacattgaggcaggcactgccaaaacatcaacctgccagctggccttgtgaggagctggaaacacatgttccccttgggggtggtggatgaacaaagagaaagagggtttggaagccagatctatgccacaagaaccccctttacccccatgaccaacatcgcagacacatgtgctggccacctgctgagccccaagtggaacgagacaagcagcccttagcccttcccctctgcagcttccaggctggcgtgcagcatcagcatccctagaaagccatgtgcagccaccagtccattgggcaggcagatgttcctaataaagcttctgttccgtgcttgtccctgtggaagtatcttggttgtgacagagtcaagggtgtgtgcagcattgttggctgttcctgcagtagaatgggggcagcacctcctaagaaggcacctctctgggttgaagggcagtgttccctggggctttaactcctgctagaacagtctcttgaggcacagaaactcctgttcatgcccatacccctggccaaggaagatccctttgtccacaagtaaaaggaaatgctcctccagggagtctcagcttcaccctgaggtgagcatcatcttctgggttaggccttgcctaggcatagccctgcctcaagctatgtgagctcaccagtccctccccaaatgctttccatgagttgcagttttttcctagtctgttttccctccttggagacagggccctgtcggtttattcactgtatgtccttggtgcctggagcctactaaatgctcaataaataatgatcacaggaaaaaaaaaaaaaaaaaa

SEQ ID NO: 2367 - DNA, 510 bp, Homo sapiens
tgggaagaaaaagaggtttaattggccttacagttccacatggctagggaggcctcagaatcatggtaggagaccaaaggcacttcttacatgctggtggcaagagaaaatgaagaaacaaaagtggaaacccctgataaacccatcagatctcgtgagacttcaccatcacgagaatagcacgggaaagaccagcccccatgattcagttacctccccctgggtccctcccacaacatgtgggaattctgggagatagatacagttcaagttgaaatgtgggtgggggcacagctaaaccatatcacacttttaatgtcactgtattcctggtgagacgtgacagtgttaatgaggaagacatcaaggcattggggctacagattgccagagtcccatgcaaatcatgagtcgctcggaccacccagcccgagttctgaaggagcgcgtcctcctcagatgctagggacccacagagcattctctttgggacttccttagagaccggag

SEQ ID NO: 2368 - DNA, 986 bp, Homo sapiens
gctcatcatgaacaaaaccaaggcagacaacactgtcattaatggagcttatcatgtaatacggaagcctgggataagcaacaaattacacaagtgacaaatgtgatgagtgctgtgaagcagagtgcggggtgcccagggaatcagcagagccctggaggataacagcctgagctccaggaaggaagtttcttcaagtgtaaaatgagagattggatggatcagaagattcaggcctccttgaagatccccatgggtgaaccccaacacacaggctattcagccagcagccccaagtcctttatgaaaagccaaggttgattgaaactctcccttctcaggagagaaactagaggcaaagcttcctcatcagcagagataaacttgacaggagccaattcaggtaggaccatggccaactcagggctcgtgcttgatcgaaggggatctgtgttagtcagcattctccagagaaatggaacccattggatagatatgtaaagagatttattatgggagttggctcatgcaattgtggagtcctagaagacccaccacctcctgtctgcaagctggagaaacagcaaagccagtgacgtaattaagtctgaatccaaaggcataagatcaaggagaactgatggtcacctgtgtatacttccattatggcatgtaacatgctggcaagaaattgattcattgggttgtgtcttctcagctgcctgaagaatgaaatcatatactctagtttcatatgcccagcattgtacacaacttgacacatcacagcagctctaggaaagcacataggctgacaactgagtgaacaacccactgactgtgtgtcgttcagggttgggaaagcaagggcaggtctctgtgccccatctctagcttttcctcaacttaggctttataaacccttgcatcaaaaaataaaagctaaggctaattgtttcaaaaaaaaaaagaaaaaaaaaaaaaaa

SEQ ID NO: 2369 - DNA, 4425 bp, Homo sapiens
actatcgagaagcagatgacaggctcaggccttaccagggatgcacttgccacattttggaaagactacataaaaaacctttaaaaattggagccctttgggcctcaggtatccaaagagcacattttttggaaactcaacactcaggaaggtcgcatagagccagtttatgcagatgtcatccatactgtagggccaatagccaggggccatattaatggttcccacaaggaagaccttgcaaattgctataaatcatctctgaagctcgtgaaagaaaataacatccgatcagttgcatttccctgcatctcaacaggcatttatggctttcccaacgagcctgctgcagtcattgccctcaacaccattaaggaatggcttgccaagaatcaccatgaggtggatcggatcattttctgtgtcttcttagaagttgacttcaaaatctacaaaaagaaaatgaatgagtttttctccgtagacgataataatgaagaagaagaggatgttgaaatgaaagaagattcagatgagaacggtccagaggagaagcaaagtgtggaagaaatggaagagcagagccaagatgcagatggtgtcaacactgtcactgtgcccggccctgcttcagaagaggcagttgaagactgtaaagatgaagattttgcaaaggatgaaaatattacaaaaggcggtgaagtgacagatcattctgtgcgtgaccaagatcatcccgatggacaagagaatgattcaacgaagaatgaaataaaaattgaaacagaatcgcagagctcatatatggaaacagaagaactttcatcaaaccaagaagatgccgtgattgtggagcaaccagaagtgattccattaacagaggaccaagaagaaaaagaaggtgaaaaagctccaggcgaggacacacctaggatgcctgggaaaagtgaaggctccagtgacctagaaaatactccaggtcctgatgttgaaatgaatagtcaggttgacaaggtaaatgacccaacagagagtcaacaagaagatcaactaatagcaggggcacaagatgaagcgaaggaacaaagaaatggaactaaatgacaatcctcagcatcgcaaggcctctcctggctctgggggagctcgggaagatagcagcacacgctgtggaggagggtgggggtggggggaaggcaagtcccatggaaggacggggaatcctttactctaatttctccagctgcattttgttccgtttatctgcagaaaaagaaagaaaaaaaagaaaaaaaaagtttcctttaatttggtggagggacccatgttgacgcatctttcaggcattatccttgtaatttctgtcttttctcttacaactttgccccagggtcacagtggcttgattgaacactcacatgtgtatcctggcccctgtctgctttcttggttatttcacaaagctggtcacacagtggtttattcaaaggaaggggaggaagacagtggtttgataagctgcaggataaattttaggaatcaatgagcccagcagcagtataatccccagacagaggaggcaggatagaaaatgggcaaaagcctcggaaaccacttggaaaaggtctggacaatgaggtgaaaatattttcttcagggttcccaaggcacaatttgttccaagtggctaatgagaaatatggaagctgaattttttccagagcagagtgcagaggcataacagaagggtgggccctggcagccatctgggtctcttccttcctaaccatggtggcaggtgcatccttctttgacactgactttcagcagagcttacttggttcatgaggtcttcacatggagactaccagcaagaggtgactctctgctgcataactgtaaaggatggccctttgctaggtgttacagttaaaagctaagaaaaggggcagtgcatttaggacccaaacatatgcctatgaatatcaaaagctcctcctgaaattgctgtgagttttccataaaagaatatcctgtcttcacccaaggcttgacagcccacagagtggtctcatttgaaattacaggaaattagagcttttgcttgcagttctgccttcctggcctgtgtttaaatgctgtcacttgtttatgccaagttcaaggctgattcaatggttggtcccctcacccagaaaaccctgaaggggaggatacagctctgaaggggggcagcagtactaaaaacccaagatgccagtggtatagtgggcacaagggatggcgaccatgaggatgccaggcatcatcaccaatatctatcctagagccagtataaggccagatgcctacttcccacagcctccccgggttccaaagtcatgtcattgttttcagtggaaacatatcgtttgttgcatatcttcttaaatccatcttccttgtaagggctttagaactaaaacttacttatattgtttttccttaacagagggagaaaaatagtggattattatttctaaaataaaaggatgttctgctttctaaatatcccatcaaaatcttcagttttgcacttttttgatggaaaattcatcttatcttcctatgactttggttttagcctttctgaatttgttaccccttctggatggcttatttgatatactggaatagttaacaagctatacttcagcatatgcactatattctaacaaattttttttaataaaatcaagacatcagcaagaatgacatttacgtgacctcataatgtgggattatggccttctgttgctattccagtttgatatggaagcatctatatcctctattgccgttagatgttgttgcttttcagaaaagtaacgaaaaggctcattttaaagaatccaagaaacgatgtcatccaaatattgacagtttctacatttcatgccatctttataactcaattgaaagttgccgtcattcttgtgaagtatttgacaagtgcaatctgctagaagctcgtttttcttgtgactcccaaatgttagtgctacttagcctcagtaatgagttacagttgaaaaaaacatgagggaaacagagggacagagattttctaatgaacaatgatggaagagacctaatgtccttgctagaaacagccaggatggaaattatccagccctggcattctccttatcatcaatgacagtcattttattcatttatttcaaatgtgggtgggctagaagtggaaggagggaattctctctgcctaaaaattctagaagaatgaaagtaatctttgtatccaggaaactaagagaatgaggaataaatatcttcagcccgactcctgaatttgtttattcttccatctataattagattgtgttttcatttttgctttgtcatgctttttggttgttatttggctatacagttttatgctttaaaacaaatgataaagttaatttccaattcaatagtgaaatattaacaatctaactatagccagatcaaagacacctgaacacagaaaacctttatttgctggtgctgccattgcacaggctgtacaatgaaatagatttgaaaagctgattgattttcccgcacataaattctggatgtcaatttccaaccaaactccaatacagctatgtggcatgaagagttacaggagggagggaggaaaatagccctatgttagtcatgtttgcatacagaggatcaaagtaggccttcaccataatagttctaattaaaatggtcctcgctgtaggagagacaaaggggcttttcctctagctggtaactattcagatgatggacaagtcttctttcataaaagattacaaagaaggcatccgaatcactgtctgtgatactgggtcacatattaatcactgcagctaattgtaaatctttctatgaaacactgaaaagcctctttgtgaattaatacagttctgcttgatgcacttgatttgaaaagacatttctctgtatgtggcgcatgtcggctttgctttgaaaaataacaaagttagcagaatatgttcaatatattttcttggggaatagggtttttattacatgattcattaaggatttgccttaccctgacatttgtgatataaaggaaaatcagaaaaaaagtaattttcttgatcaagatatgtttttacttaatgcaaataaatgtagtctgttgcttgcaaggaaaaaaaaatggcttctgatatctggtataaactgctaaataggataatacgtgcctcttttgttaaaccggcatttaaatgctggactgcttctaaatctgtttgtttcttttcatctgtgccatacactaaaaaacaactgttgccttcatactatatttgttagagcagaatacaaataaaatttgtttgagaggataatgtgaaa

SEQ ID NO: 2370 - DNA, 2098 bp, Homo sapiens
aaaacggcatttccgggaagatggcggcgcacaagtcaggtccggcacatgtttccgcggagcggacccagcaatgacgaggtcaagagtcgtgggatgaagtttgctgaggagcagctgctaaagcatggatggactcaaggcaaaggcctcggccggaaggagaatggtatcactcaggctctcagggtgacactgaagcaagacactcatggggtaggacatgaccctgccaaggagttcacaaaccactggtggaatgagctcttcaacaagactgcggccaacttggtagtggaaactgggcaggatggagtacagataaggagcctttctaaggagaccacccgttataatcatcccaagcccaacttgctgtatcagaagtttgtgaagatggctacattgacttcaggtggagagaagccaaacaaagacttggagagctgcagtgatgacgacaaccaggggtccaagtccccaaagattctgactgatgagatgctgctccaagcctgtgaggggcgaacagcacacaaggctgcccgtcttgggatcacaatgaaggccaagcttgctcgcctagaggcccaggagcaggccttcctggctcgtctcaaaggccaggaccctggggcccctcaactgcagtcagagagcaagccccccaaaaaaaagaaaaagaaaaggaggcagaaagaggaggaagaagctacagcatctgaaaggaatgatgcagatgagaagcacccagaacatgctgagcagaacatcagaaaaagcaagaagaagaaaaggcgacatcaagaaggaaaggtctcagatgaaagagagggtacaactaaagggaatgagaaggaggacgctgcaggaacaagtgggcttggggaattgaatagcagagagcaaaccaatcagtccctcaggaaagggaagaaaaagaagaggtggcaccatgaagaggagaagatgggggtcttggaggaaggaggaaaaggcaaggaggctgcaggcagtgtcaggacagaggaggtagagagcagggcatatgctgacccatgcagccgaagaaagaagaggcagcaacaggaggaggaggacttgaacctagaagatagaggtgaggaaacttttaggtggtggaaccagggaagcagagagcagagcatgcagtgatggaagaagcaggaaaagcaagaagaaaagacagcagcatcaagaggaggaggacatcttggatgtaagggatgagaaggatggcggggctagggaagcagagagcagagcacacactggctcaagcagcagaggtaagaggaagaggcagcagcatcccaagaaggaaagagctggagtcagcactgtccagaaagccaaaaagaaacagaagaagagagactaaaggtctggtaaaggtagggctcaattgattgattttcaggagttgaagcctcaaagaccagggttgatgcaggtctgcaggtcttctgcacccccctcaatgaggagtccctcccagaaaggaaactgatctctgggacgtcagctgctgagaggagcaagcggtagtaccaccccttagttgagggagtcagcacagtcctttctgcagcttctaacccaggaccatgaactcaggtgcctagagaagccaggcagctaaaggacaaggaatgctgggggctgtgggaacaggaatgcagataccctttgaaggagcattcctgctaaaagaagctgaaaatgtagacctatgtgaagtgctctgatttctaaatattgtgaaggttaagaaaaacataaatttaggtctatgggctagatttagcccacagttgccagtttctagcgctaccaaatgaatgaataaacatgagcttgcgctcctagcctagagataaatcctgactggcatctctgttcccagcctgggaaggtcctgaatacaaattagaagatattccttggaggcctttgaagaaattccttcggttaacctctttgtagtcttgctacactgataagtagaagtagctccctgtctgtgtcccaaatgaataagaattgtgtaaaggacagcaaaaaaaaaaaaaaaaaa

SEQ ID NO: 2371 - DNA, 7947 bp, Homo sapiens
tgtttgacccggaagtggctgtgttcagctgacagctgctgataaggtggcggcggcgaaggcagcggcaggtcgggagcaagatggcgctgcggccaggagctggttctggtggcggcggggccgcgggagctggcgcggggtccgccgggggaggcggcttcatgtttcctgttgcaggtgggataagaccccctcaagcaggcctgatgccgatgcagcaacaaggatttcctatggtctctgtcatgcagcctaatatgcaaggcattatgggaatgaattacagctctcagatgtcccaaggacctattgctatgcaggcaggaataccaatgggaccaatgccagcagcgggaatgccttacctaggacaagcacccttcctgggcatgcgtcctccaggcccacagtacactccagacatgcagaagcagtttgccgaagagcagcagaaacgatttgaacagcagcaaaaactcttagaagaagaaagaaaaagacgccagtttgaagagcagaagcaaaagctcagacttttgagcagtgtgaaacccaagacaggagagaagagtagagatgatgctttggaagccataaaaggaaatttagatgggttttccagagatgcaaaaatgcaccctactccagcatcgcaccccaagaaaccaggtgtgggagtatttccctcacaggatcctgctcagcccagaatgcctccttggatttacaatgagagtttggttccagatgcctataagaaaatcttagaaaccacaatgactccaactggaatagatactgccaaactgtatcccattctgatgtcatctgggcttcccagggaaactcttggacagatatgggccttagctaatcgaactacacctggcaaacttacaaaagaagaactttataccgttctagccatgatagcggtaacacagaggggcgttcctgcaatgagtcctgatgctttaaaccagttcccagcagctcctattccaactttaagtggcttttctatgactctgcctacaccggtgagtcagccaactgtgataccttcaggtcctgcgggctccatgcccctcagccttggacagccagtcatgggcattaaccttgttggaccagtgggtggagctgcagcccaggcttctagtggtttcataccaacctaccctgcaaatcaggtagtaaagccagaagaagatgacttccaggattttcaagatgcttctaagtcaggatcccttgatgactcattcagtgatttccaagagttgcctgcttcttcaaaaacaagtaactcccagcatggaaacagtgccccttctttgttgatgccacttcctggaactaaagcattgccttcaatggacaaatatgctgtgtttaaaggaattgcagctgacaagtcctctgaaaatactgttccacctggagatcctggtgataaatatagtgctttcagagaacttgaacagacagcagagaataaacctttaggagaaagctttgcagaattcagatctgcaggaactgatgatggtttcaccgattttaaaacagccgatagtgtatcaccactagagccaccaacaaaagacaaaacttttccaccatccttcccctcaggaactatacaacagaaacaacaaacacaagtgaaaaaccctctgaacttagcagacctagatatgttttcctcagttaattgcagcagcgagaaaccattgtctttttcagctgtgtttagcacatcaaaatcagtttctacaccacagtcaacaggttctgctgctactatgacagcattggcagcaacaaaaacttctagtttggctgatgattttggagaattcagcctttttggggaatattctggtctagcacctgttggggagcaggatgactttgcagattttatggctttcagtaatagctctatttcatctgagcaaaagccggatgacaaatatgatgcccttaaagaggaagccagtcctgttcctctaaccagcaacgtgggcagcacagtgaagggtggacaaaactcgactgctgcgtctaccaagtacgatgtcttcagacaactttctctggaagggtctggactaggtgttgaagacctgaaagataacactccttcaggaaaaagtgatgatgattttgctgacttccactccagtaaattttcttccataaactcggacaaatccctgggagagaaagcagtggctttcagacacaccaaagaagactctgcatcagtgaagtccttagatctcccttccattggtggcagcagtgttggcaaggaggactctgaagatgcactctctgttcagtttgacatgaaattggctgatgtgggaggagatcttaagcatgtcatgtctgatagctctttggatttaccaacagttagtggccagcatcctcctgctgcagatatagaggacttaaaatatgctgcttttggaagctacagtagcaattttgcagtgagcacacttacaagctatgactggtcagacagggatgatgcaactcagggcagaaaactctctccatttgtcctctcagcaggaagtggatccccctcagccacctcaattcttcaaaagaaagagacttcatttggcagttctgaaaacatcaccatgacatctctctccaaagtaacgacctttgtaagtgaagatgctcttccagagaccaccttcccagctcttgccagttttaaagacacgattcctcagaccagtgagcaaaaggaatatgaaaacagagactataaagatttcacaaaacaggacctgcctacggctgaacggagccaggaggccacgtgtcccagcccagcgtccagtggtgcctctcaagaaaccccgaacgaatgttcggatgactttggagagtttcaaagtgaaaagcccaaaatcagcaaatttgacttcttagtagccacttcacaaagcaaaatgaaatccagtgaagaaatgatcaaaagtgagctggcaacctttgacctttctgttcaaggatcacacaagaggagtttgagccttggtgataaagaaataagccgttcttctccttctccagctttggagcagcctttcagagaccgttccaatactctgaatgagaagcccgccctgcccgtcatccgagacaagtacaaagacctgacgggagaggtggaggaaaatgagagatatgcatatgaatggcagagatgcctggggagtgccctgaatgtcattaagaaggcaaatgataccttaaatggaatcagtagtagttctgtttgcacagaagtaattcagtcagctcaaggcatggaatatttattaggtgttgttgaagtgtacagggtaaccaagcgtgtggagctggggataaaagccactgcagtgtgcagtgagaaactccagcagttgctgaaggacatcgataaagtatggaataacctaatcggcttcatgtcactcgccacactcacaccagatgaaaactcgctggatttttcctcctgtatgttacggcctgggattaaaaatgctcaggagcttgcctgtggagtgtgcctcttgaatgtggactcgaggagccggaaagaagagaagcctgcagaagaacatcctaaaaaagcattcaactcagaaacagacagtttcaagctggcctatggagggcaccagtatcacgccagctgtgccaacttctggatcaactgtgtcgaaccaaagcctcctggcctcgtcctgcctgacctgctctgaacaactcctctgtgaagcattgacttttttttttctgtgacaccccacggggtgacagggaccaataaatagaatgcgagcactgcacagttcgcttccctgaatcgatatgaagaacaccgcaagggacggggcccccgtcatccccacggccagtctgcaggacttcaggtaaaattgtcccacccaaactgcacgtggcaccagaagcttgctcacttatctctacttaagattttctgaaatacggaccacggctttcttgatctaaggaagaacttgctgctgcagtattgaaactgtgaagaactgacatttgaagaaaaatagattaccgttgcgggactagaatgggcgactgcttggagccagtgcttgtttttatctaggacacttactgtcctgtgaagtagaatacatttatctgcatttagtttgttaatgtctgaaatgaataaaaagaggaaattgcgattaaactgatgttctgctttttatggagaagattctgcccatctcccctggacagtagcaggcaggtgagggcagattttacccacttggttgtcacaactgaaccagttctctactccttcccttcacttctgtccactctcaagactttttcccaaaacatgcctgggcactctgcagccgtgaagaatgctcattttgacagaggcccaaatcctgtgtattaggataatatccttccccccgggagccttcgctgcaaacctgttctgccgcatgcaaagactgtgaccatggagttttctcagacaagatttggaaaggcagtggaatgaaatctctttgcagtggcctctctccaaatttccaaagatgactgcatagggaccaacactgcctgactttgcagtatctgtgagaaaaacctgaaaattaattcagggtgaaaatgtggagctctcggcctagtgtaaagtatcaagatgtatatttatgggatagatacatgacttagaagaagtagaagaaaattgtccagaaacagtactgaattttagatagaaaaggctcatgcttcctggagtagggaattgtctttgccatttaatgtgaatgcataaaattaggggaaaaacccaagtggctaagagctgtgttattcctgggaagaactaccaatctagggcacacgtctctctgaattgttgattatgcgctttatgaagagatttttcaatctcgtgtgctttactttgtgtggtttagaccctctgacctagacttttatttttaaactgaaaaagttggtcttgtctatataattgctgcttttacataatttattttcccctctcaggacaaattctgtcttgctccatcttacagcttttccatgttctccaagaaaggtgtggaacattttcattaaacagctgttgctgaggcttctgcttgaccttctgcgtgcccgaatgcacagagaggcaccgaggagagaaaggcttttctcactcgctcccgatgataccgtctctggccattcctgactgaggcagctcactctgaatgggcacctttggagcttttgcccaccacaaggctagtggggtgtttctaacaacacaagtgggacagcttttggcaggcttttcctgaggcctcggcgcttccatcctggacagcaccacttccacatggagctggaatgcaagcaggctgctaattggccttaaaaattctttgtttttttttgagatggagtttcactcttgttgcccaggcttgagtgcaatggcacaatctcagctcagtgcaacctccgcctcccgggttcaagcgattctcctgcctcagcctcgtgagtagctgggattacaggcgtgcaccaccacgcccagctaattttgtatttttagtagaggcaaggtttctccatgttggccaggcttgaactccggacctcaggcgatccgcccgcctcagcctcccaaagtaccgggattacaggcgtgagccactgcgcctggcctaaatttcataacagaaccatgacagcagaatctacctttgcaataagaatgtttcccaggagttagagaccagccctgggcatgatggtaaagaccccagctaattatacaaaaaataattagccgggtaggtggagtgcatctgtggacattcgtggtcccagctactaggtaagctgaggcgggagatcacaagtccaggagtttgaggctgcacgtgacagcgtaggtgatgacagagcgagacactgtctcttaaaaaaaaaaaaaaaaaagtttcccagtttgaatttgtattgctgaagcatttttttgaaatgctatatagatgcctgtcatgtcacagtggcccagtatcaacattttaaaaagctcacttggtagctgggctggtttctattcctgagaaattccagaatgcctcagataaaattccttagtataatccccattttccttaccaaggatggtaggcttagtcactccttgggaggtgccacaggaaaattcagcagatgtcaacagaaaaaaagcctttgctatgaaaagtattcactacctttcatatctcttgaatacttgaaatgtttaattagatgccaccaatagggatccaaggagtgtgggacacggttgcgctgcttttctttataaacgtttattaaaatggctcaacgctgcattcagcttcacctcagctcttcttgtcagccaggagccccgtgtccttggaaactgtagccaaggttacttatttccatactgtgcattgtgtcagcccgcttcaccccactgcttgaatggccattaataagcacttttctttttttggtgggatgttttgcctttaaaatttttatggcttagtgtgtaatttaatttttgtctggacatgcttgagatagaagaggtactggatatatgaggatattttccatgctttatttttcctgtggctactagttagcattccataggggttgtgaatttttaattatttgaatattttgtgtacatatacatatttgaagggttttgggggggtcttatttgtttaaaggtgtcttctgtttgcctatttcaagtgtacttcagctttgcaaagattatagggctgtatgttacagaaataggaaatgctggccctgtactggggaccactacaaaaattccctttagccgggcgtggtggctcacgcctgtaatccccagcactttgggaggccgagccgggtggatcacccgaggtcaggagttcaagaccagcctggccaacatggcgagaccctgtctctactaaaaatacaaaaattagctgggcatggtggcaggtgcctgtaatccgagctactcgggaggctgaggcaggagaattgcttgaaccagagaggcggaggttgcagtgagccgagatcgcgccactgcactccagcctgggcaacaagagcgaaactctgtctcaaaaataaaaaattccctttaacaccttcaaggtcaaatgcctgcctttgtgaacagttaataaactgacattttcagacatttgccattcagaagggagcattgtagcctgctgtagaccattccagcaaatgtcagaatgcagggcaagatgtgtgtcgactatgttttttatgtttaagttacttacttatttcttcaggtaagtgtgtaccaaataacaatactgaaaagccctccccttgccaggccgaggaaataaagcttaagtgaaacagctcttgggggaaaaatgccactttacaaatacttttctaacaaaatagcattataatgaagtttttacttaattccattatttatatgttgacgtgaatgtaagtggttaaaaagtattcatgtgggacatctcattactttgtagctgtggctttattaaccagtgaatgctgtggcccttagcgaaatgcgttgtcttctgcgtgatgtggaattcgcgcctgtattttaaaagatggtgtggtttctcccttgtttgtattttaataaacaactgctctaattgatgtgtttagacattataaagcttcacctttaaaatattttcagggtctgttctgaaatcaccccttgttaaacttctctaaccaaaatacaagtgtagaagaatgtcaggctaaaaaaaaaaa

SEQ ID NO: 2372 - DNA, 2387 bp, Homo sapiens
agacacctctgccctcaccatgagcctctggcagcccctggtcctggtgctcctggtgctgggctgctgctttgctgcccccagacagcgccagtccacccttgtgctcttccctggagacctgagaaccaatctcaccgacaggcagctggcagaggaatacctgtaccgctatggttacactcgggtggcagagatgcgtggagagtcgaaatctctggggcctgcgctgctgcttctccagaagcaactgtccctgcccgagaccggtgagctggatagcgccacgctgaaggccatgcgaaccccacggtgcggggtcccagacctgggcagattccaaacctttgagggcgacctcaagtggcaccaccacaacatcacctattggatccaaaactactcggaagacttgccgcgggcggtgattgacgacgcctttgcccgcgccttcgcactgtggagcgcggtgacgccgctcaccttcactcgcgtgtacagccgggacgcagacatcgtcatccagtttggtgtcgcggagcacggagacgggtatcccttcgacgggaaggacgggctcctggcacacgcctttcctcctggccccggcattcagggagacgcccatttcgacgatgacgagttgtggtccctgggcaagggcgtcgtggttccaactcggtttggaaacgcagatggcgcggcctgccacttccccttcatcttcgagggccgctcctactctgcctgcaccaccgacggtcgctccgacggcttgccctggtgcagtaccacggccaactacgacaccgacgaccggtttggcttctgccccagcgagagactctacacccaggacggcaatgctgatgggaaaccctgccagtttccattcatcttccaaggccaatcctactccgcctgcaccacggacggtcgctccgacggctaccgctggtgcgccaccaccgccaactacgaccgggacaagctcttcggcttctgcccgacccgagctgactcgacggtgatggggggcaactcggcgggggagctgtgcgtcttccccttcactttcctgggtaaggagtactcgacctgtaccagcgagggccgcggagatgggcgcctctggtgcgctaccacctcgaactttgacagcgacaagaagtggggcttctgcccggaccaaggatacagtttgttcctcgtggcggcgcatgagttcggccacgcgctgggcttagatcattcctcagtgccggaggcgctcatgtaccctatgtaccgcttcactgaggggccccccttgcataaggacgacgtgaatggcatccggcacctctatggtcctcgccctgaacctgagccacggcctccaaccaccaccacaccgcagcccacggctcccccgacggtctgccccaccggaccccccactgtccacccctcagagcgccccacagctggccccacaggtcccccctcagctggccccacaggtccccccactgctggcccttctacggccactactgtgcctttgagtccggtggacgatgcctgcaacgtgaacatcttcgacgccatcgcggagattgggaaccagctgtatttgttcaaggatgggaagtactggcgattctctgagggcagggggagccggccgcagggccccttccttatcgccgacaagtggcccgcgctgccccgcaagctggactcggtctttgaggagcggctctccaagaagcttttcttcttctctgggcgccaggtgtgggtgtacacaggcgcgtcggtgctgggcccgaggcgtctggacaagctgggcctgggagccgacgtggcccaggtgaccggggccctccggagtggcagggggaagatgctgctgttcagcgggcggcgcctctggaggttcgacgtgaaggcgcagatggtggatccccggagcgccagcgaggtggaccggatgttccccggggtgcctttggacacgcacgacgtcttccagtaccgagagaaagcctatttctgccaggaccgcttctactggcgcgtgagttcccggagtgagttgaaccaggtggaccaagtgggctacgtgacctatgacatcctgcagtgccctgaggactagggctcccgtcctgctttggcagtgccatgtaaatccccactgggaccaaccctggggaaggagccagtttgccggatacaaactggtattctgttctggaggaaagggaggagtggaggtgggctgggccctctcttctcacctttgttttttgttggagtgtttctaataaacttggattctctaacctttaaaaaaaaaaaaaaaaaaaaaaaaaaaaaaaaaaaaaaaaaaaaaaaaaaaa

SEQ ID NO: 2373 - DNA, 1751 bp, Homo sapiens; identical to SEQ ID NO: 2098

SEQ ID NO: 2374 - DNA, 6133 bp, Homo sapiens
cgttggccgggcccgggggaggaggggaatctcccgccatttttcaataatttcctccggtgctgctgaggaggagtcgtgactgccggccgccgggacccgaagcggaggtcggcggggggctgctgggaggcgcggcggtgtgcgcgggagctctgcgccgtggcgttccgctccatgactgtcgcgcggccgcgccggcggtgagggagccggagttcgcgccgccctctcacccctcccttcccccaccccacccccgggcgcctggcgctcgctccgggccgcggggcctagtgctgcgccgcggggccggccccagcagccgccagtccccaccgccgccgccgcgatggcgccgctcctgggccgcaagcccttcccgctggtgaagccgttgcccggagaggagccgctcttcaccatcccgcacactcaggaggccttccgcacccgggaagagtatgaagcccgcttggaaaggtacagtgagcgcatttggacgtgcaagagtactggaagcagtcagctaacacacaaggaagcctgggaggaagaacaggaagttgctgagcttttgaaggaggagtttcctgcctggtatgagaagcttgttctggaaatggttcaccataacacagcctccttagagaagttagtagatactgcttggttggagatcatgaccaaatatgctgtgggagaagagtgtgacttcgaggttgggaaggagaaaatgctcaaggtgaagattgtgaagattcatcctttggagaaagtggatgaagaggccactgagaagaaatctgatggtgcctgtgattctccatcaagtgacaaagagaactccagtcagattgctcaggaccatcagaagaaggagacagttgtgaaagaggatgaaggaaggagagagagtattaatgacagagcacgtagatcgccacgaaaacttcctacttcattaaaaaaaggagaaaggaaatgggctcctccaaaatttctgcctcacaaatatgatgtgaaactacaaaatgaagataagatcatcagtaacgtgccagcagacagcttgattcgtacagagcgcccaccaaataaggagatagttcgatactttatacggcataatgcattacgagctggtactggtgaaaatgcaccttgggtcgtagaagatgaattggtgaagaaatactctctgcccagcaagttcagtgactttttacttgatccatacaagtatatgactctcaacccttctactaagaggaagaatactggatccccagacaggaagccctcaaagaaatccaagacagacaactcttctcttagttcaccactaaatcctaagttatggtgtcacgtacacttgaagaagtcattgagtggctcgccactcaaagtgaagaactcaaagaattccaaatctcctgaagaacatctagaagaaatgatgaagatgatgtcgcccaataagctgcacactaactttcacattcctaaaaaaggcccacctgccaagaaaccagggaagcacagtgacaagcctttgaaggcaaagggcagaagcaaaggcatcctgaatggacagaaatccacagggaattccaaatctcccaaaaaaggactgaagactcctaaaaccaaaatgaagcagatgactttgttggatatggccaaaggcacgcagaagatgacacgagccccacggaattctgggggtacacctaggacctctagtaaacctcataaacatctgcctcctgcagccctacacctcattgcatactacaaagaaaacaaagacagggaggacaagaggagcgccctgtcctgtgttatctccaaaacagctcgtcttctctctagtgaagatagagctcgtctcccagaagaattgcgaagtcttgttcaaaaacgctatgaacttctagagcacaaaaagaggtgggcttctatgtctgaagaacaacggaaagaatatttgaaaaagaaacgggaggagctgaaaaagaagttgaaggaaaaagccaaagaacgaagagagaaagaaatgcttgagagattagaaaaacagaagcggtatgaggaccaagagttaactggcaaaaaccttccagcattcagattggtggatacccctgaagggctgcccaacacgctgtttggggatgtggccatggtggtggaattcttgagctgttattctgggctacttttaccagatgctcagtatcctattactgctgtgtcccttatggaagccttgagtgcagataagggtggctttttataccttaacagggtgttggtcatcctcttacagaccctcctacaagatgagatagcagaagactatggtgaattgggaatgaagctgtcggaaatccccttgactctgcattctgtttcagagctggtgcggctctgcttgcgcagatctgatgttcaggaggaaagcgagggctcagacacagatgacaataaagattcagctgcatttgaggataatgaggtacaagatgagttcctagaaaagctggagacctctgaattttttgagctgacgtcagaggagaagctacagatcttgacagcactgtgccaccggatcctcatgacatactcagtgcaagaccacatggagaccagacagcagatgtctgcagagttgtggaaggaacggcttgctgtgttgaaggaagaaaatgataagaagagagcagagaaacagaaacggaaagaaatggaagccaaaaataaagaaaatggaaaagttgagaatgggttaggcaaaactgataggaaaaaagaaattgtgaagtttgagccccaagtagatacagaagctgaagacatgattagtgctgtgaagagcagaaggttgcttgccattcaagctaagaaggaacgggaaatccaggaaagagaaatgaaagtgaaactggaacgccaagctgaagaagaacgaatacggaagcacaaagcagctgctgagaaagctttccaggaagggattgccaaggccaaactagtcatgcgcaggactcctattggcacagatcgaaaccataatagatactggctcttctcagatgaagttccaggattattcattgaaaaaggctgggtacatgacagcattgactaccgattcaaccatcactgcaaagaccacacagtctctggtgatgaggattactgtcctcgcagtaagaaagcaaacttaggtaaaaatgcaagcatgaacacacaacatggaacagcaacagaagttgctgtagagacaaccacacccaaacaaggacagaacctatggtttttatgtgatagtcaaaaggagctggatgagttgctaaactgtcttcaccctcagggaataagagaaagtcaacttaaagagagactagagaagaggtaccaggacattattcactctattcatctagcacggaagccaaatttgggtctaaaatcttgtgatggcaaccaggagcttttaaacttccttcgtagtgatctcattgaagttgcaacaaggttacaaaaaggaggacttggatatgtggaagaaacatcagaatttgaagcccgggtcatttcattagagaaattgaaggattttggtgagtgtgtgattgcccttcaggccagtgtcataaagaaatttctccaaggcttcatggctcccaagcaaaagagaagaaaactccaaagtgaagattcagcaaaaactgaggaagtggatgaagagaagaaaatggtagaggaagcaaaggttgcatctgcactggagaaatggaagacagcaatccgggaagctcagactttctccaggatgcacgtgctgcttgggatgcttgatgcctgtatcaagtgggatatgtccgcagaaaatgctaggtgcaaagtttgtcgaaagaaaggtgaggatgacaaattgatcttgtgtgatgagtgtaataaagccttccacctgttttgtctgaggccggccctctatgaagtaccagatggtgagtggcagtgcccagcttgccagcccgctactgccaggcgcaactcccgtggcaggaactatactgaagagtctgcttctgaggacagtgaagatgatgagagtgatgaagaggaggaggaggaagaagaggaggaggaggaagaagattatgaggtggctggtttgcgattgagacctcgaaagaccatccggggcaagcacagcgtcatcccccctgcagcaaggtcaggccggcgcccgggtaagaagccacactctaccaggaggtctcagcccaaggcaccacctgtggatgatgctgaggtggatgagctggtgcttcagaccaagcggagctcccggaggcaaagcctggagctgcagaagtgtgaagagatcctccacaagatcgtgaagtaccgcttcagctggcccttcagggagcctgtgaccagagatgaggccgaggactactatgatgtgatcacgcaccccatggactttcagacagtgcagaacaaatgttcctgtgggagctaccgctctgtgcaggagtttcttactgacatgaagcaagtgtttaccaatgctgaggtttacaactgccgtggcagccatgtgctaagctgcatggtgaagacagaacagtgtctagtggctctgttgcataaacaccttcctggccacccatatgtccgcaggaagcgcaagaagtttcctgataggcttgctgaagatgaaggggacagtgagccagaggccgttggacagtccaggggacgaagacagaagaagtagagaggcagggccgtggtgacagtatcagtgagtgccatacagaattgtgtattcaccagcatcatgaaacagttgtggtcttttgagttgatcttggcagagtaaagggacgtgtcctggagccattcctgaatctccccttctttgtgacagctcctcccacccccccaaaaaataaaaaaaccacaaaaaacaaaaaaacaaaactaaggcacttcacttagagactggagtcctgcttataatcatgcatataacctttactttgatggatctggccagaggggtgttggagcccagcccacccacataccagtcaagctcttaggggagcagaagaaaagcaggaagaatttaaatgtttaattttttttttaaattgacttttctagttattaaaagttgcttgtttcagcagtgatattgtataaagaacatcttgtaagatactcctgacatcttgctttagcacatgtacagtacagtttctatgataatgtgtttgctctaacttccctggcttctccttcagcccatccactctcctctagagcagttgggttggaggctcattgaggcaagcagcaacattggagggggagcagggcagtgctgtgtctgctgcctcccatgcccgttctgacctcagccttggaactcctcaagaacctgaagattccagtggtcagtgtcggtggggggtgggaggagagagcggcagagaagctctgagagccccttcccccacaacaaatctagctctagttgttatatttaggcaaaactttgtagtcttctttcccttttatgatggattttgataaaagtacaaaacagggtttttcttttttatcacctttgaatttggaaattttgagcacccaagctcttctgtacctatttaaagtccaccaaggggactgcagctcctagaacatgagaatcaagcctcttaattttaaactgcggaatgtggcctctgcttcctccgtcctcctgcccaaggacgacgaggattgctccagggctgctgggtagtttaccgtcccttctataggcatggagttggcactgacatcacagcttcataaccccaccaccgccagcttcccctgcctcctacatccagtctgttcttgttcatagtgagaatcctgtgttcccacttcagtgacacctgaattgtttgttgttgttttttttttttattgtcttcaaagaggaagggccccattaaagggtgaacttgtaataaattggaatttcaaataaacctcatgtacttgtgtttataaagaagaaaccactctgaaaaaaaaaaaaaaaaaa

SEQ ID NO: 2375 - DNA, 3887 bp, Homo sapiens
aggtttggggtcaaggagcaaactctgcacaagatggcggcggtagcggcagtggcggcgcgtaggaggcggtcttgggcgtctttggtactggcttttttaggggtctgcctggggattacccttgctgtggatagaagcaactttaagacctgtgaagagagttctttctgcaagcgacagagaagcatacggccaggcctctctccataccgagccttgctggactctctacagcttggtcctgattccctcacggtccatctgatccatgaggtcaccaaggtgttgctggtgctagagcttcaggggcttcaaaagaacatgactcggttcaggattgatgagctggagcctcggcgaccccgataccgtgtaccagatgttttggtggctgatccaccaatagcccggctttctgtctctggtcgtgatgagaacagtgtggagttaaccatggctgagggaccctacaagatcatcttgacagcacggccattccgccttgacctactagaggaccgaagtcttttgcttagtgtcaatgcccgaggactcttggagtttgagcatcagagggcccctagggtctcgcaaggatcaaaagacccagctgagggcgatggggcccagcctgaggaaacacccagggatggcgacaagccagaggagactcaggggaaggcagagaaagatgagccaggagcctgggaggagacattcaaaactcactctgacagcaagccgtatggccccatgtctgtgggtttggacttctctctgccaggcatggagcatgtctatgggatccctgagcatgcagacaacctgaggctgaaggtcactgagggtggggagccatatcgcctctacaatttggatgtgttccagtatgagctgtacaacccaatggccttgtatgggtctgtgcctgtgctcctggcacacaaccctcatcgcgacttgggcatcttctggctcaatgctgcagagacctgggttgatatatcttccaacactgccgggaagaccctgtttgggaagatgatggactacctgcagggctctggggagaccccacagacagatgttcgctggatgtcagagactggcatcattgacgtcttcctgctgctggggccctccatctctgatgttttccggcaatatgctagtctcacaggaacccaggcgttgcccccactcttctccctcggctaccaccagagccgttggaactaccgggacgaggctgatgtgctggaagtggatcagggctttgatgatcacaacctgccctgtgatgtcatctggctagacattgaacatgctgatggcaagcggtatttcacctgggaccccagtcgcttccctcagccccgcaccatgcttgagcgcttggcttctaagaggcggaagctggtggccatcgtagacccccacatcaaggtggactccggctaccgagttcacgaggagctgcggaacctggggctgtatgttaaaacccgggatggctctgactatgagggctggtgctggccaggctcagctggttaccctgacttcactaatcccacgatgagggcctggtgggctaacatgttcagctatgacaattatgagggctcagctcccaacctctttgtctggaatgacatgaacgaaccatctgtgttcaatggtcctgaggtcaccatgctcaaggatgcccagcattatgggggctgggagcaccgggatgtgcataacatctatggcctttatgtgcacatggcgactgctgatgggctgagacagcgctctgggggcatggaacgcccctttgtcctggccagggccttcttcgctggctcccagcgctttggagccgtgtggacaggggacaacactgccgagtgggaccatttgaagatctctattcctatgtgtctcagcttggggctggtgggactttccttctgtggggcggatgtgggtggcttcttcaaaaacccagagccagagctgcttgtgcgctggtaccagatgggtgcttaccagccattcttccgggcacatgcccacttggacactgggcgacgagagccatggctgttaccatctcagcacaatgatataatccgagatgccttgggccagcgatattctttgctgcccttctggtacaccctcttatatcaggcccatcgggaaggcattcctgtcatgaggcccctgtgggtgcagtaccctcaggatgtgactaccttcaatatagatgatcagtacttgcttggggatgcgttgctggttcaccctgtatcagactctggagcccatggtgtccaggtctatctgcctggccaaggggaggtgtggtatgacattcaaagctaccagaagcatcatggtccccagaccctgtacctgcctgtaactctaagcagtatccctgtgttccagcgtggagggacaatcgtgcctcgatggatgcgagtgcggcggtcttcagaatgtatgaaggatgaccccatcactctctttgttgcacttagccctcagggtacagctcaaggagagctctttctggatgatgggcacacgttcaactatcagactcgccaagagttcctgctgcgtcgattctcattctctggcaacacccttgtctccagctcagcagaccctgaaggacactttgagacaccaatctggattgagcgggtggtgataataggggctggaaagccagcagctgtggtactccagacaaaaggatctccagaaagccgcctgtccttccagcatgaccctgagacctctgtgttggtcctgcgcaagcctggcatcaatgtggcatctgattggagtattcacctgcgataacccaagggatgttctgggttagggggagggaaggggagcattagtgctgagagatattctttcttctgccttggagttcggccctccccagacttcacttatgctagtctaagacccagattctgccaacatttgggcaggatgagagggctgaccctgggctccaaattcctcttgtgatctcctcacctctcccactccattgataccaactctttcccttcattcccccaacatcctgttgctctaactggagcacattcacttacgaacaccaggaaaccacagggcccttgtcgccccttctctttcccttatttaggagccctgaactcccccagagtctatccattcatgcctcttgtatgttgatgccacttcttggaagaagatgagggcaatgagttagggctccttttccccttccctcccaccagattgctctcccacctttcatttcttcctccaggctttactcccctttttatgccccaccgatacactgggaccaccccttaccccggacaggatgaatggatcaaaggagtgaggttgctaaagaacatccttttccctctcattctacccttttcctctccccgattccttgtagagctgctgcaattcttagaggggcagttctacctcctctgtccctcggcagaaagacgtttccacacctcttaggggatgcgcattaaacttcttttgcccccttcttgtcccctttgaggggcacttaagatggagaaatcagttgtggtttcagtgaatcatggtcacctgtatttattgctaggagaagcctgagggtggggggagatgatcatgtgtgctcggggttggctggaagccctgggtggggggttgggggaggactaatggggagtcggggaatatttgtgggtattttttttacttcctcttggttcccagctgtgacacgttttgatcaaaggagaaacaataaagggataaaccataaataaaaaaaaaaaaaaaaaaaaaaaaaaaaaaaa

SEQ ID NO: 2376 - DNA, 1093 bp, Homo sapiens
aggggcggggcctgctcgcgtcccgggtgcctggataccgagcgcgtccgtagtggcggctggcgctagggaactgcagggtctagggtgttgtcggagtggcagttggtccgaatttctcccgaagcccgcggaggagcgggtaagagccccgcgaatccggccccaacctcgggaacgggatgggaggcggccctggccgcaagccccgcgctgctagcgggtccaccgcgtcgtagccgacagccgcccttcttcctcgcagcgcgccgcgattcaccagcctggtcccttctgcggagagcgatgccgcttcccgacaccatgttctgcgctcagcagatccacattcccccggagctgccggacatcctgaagcaattcaccaaggctgccatccgcacccagccggccgacgtgctgcggtggtccgcgggctatttttcagctctgtcgagaggagatccacttcctgtaaaggacagaatggaaatgcccacggcaacccagaaaacagacacaggcctgactcaaggactcctgaaagttttgcacaagcagtgtcaccacaagcggtatgtggaattaacagatcttgagcagaagtggaagaacttgtgcctgccgaaggaaaaattcaaagcgctcttacaactggatccttgtgaaaacaaaatcaagtggataaactttttagcgcttggatgcagcatgcttggtgggtccttgaacactgcgctgaagcacctgtgcgagatcctcacggacgatccggagggcgggcccgctcgcatccccttcaagacgttttcctacgtttaccgctacttggccagattagactcagatgtgtctcccttggagacggaatcctaccttgcctctctaaaggaaaatatagacgccaggaagaacggcatgataggtctttcagatttcttctttccaaagaggaaacttttagaaagcattgaaaactctgaagatgtaggccattaatacagagaagaatacattttaatgtcaaaatagtgctctttaaaattctggcaccaaatacaacttaccctgaatcacaaaaaaaaaaaaaaaa

SEQ ID NO: 2377 - DNA, 397 bp, Homo sapiens
ttttttatacaaacacggtctcacatacttgaactcctgtatgtaagcaatcctcctgctttggcctcccaaagcgctgggattataggcatgaaccaccacgcccagcctattactgaaattttaatgatgatgacaacctcatgacaatcccaaagtactagtatatccattttactgatgagaaaagcacagctaatatgcagtaaatctagtttctgaattcaggcattcttattccagagcccatgctattaattcctatactatactgtctctatataagcatgtagcatattaatctttttaaggggggagtattagcagagccacatggaagcagtagctgctaatgtgtaaagtgacaaggccaggggcaaacctgaaaaatctactg

SEQ ID NO: 2378 - DNA, 2132 bp, Homo sapiens
ggcggggctctcggggccgctgccgccgccgccgccgcgcattgtgcagcaggcgggcccccgcgcggcagggccctggacccgcgcggctcccggggatggtgagcaaggcgctgctgcgcctcgtgtctgccgtcaaccgcaggaggatgaagctgctgctgggcatcgccttgctggcctacgtcgcctctgtttggggcaacttcgttaatatgaggtctatccaggaaaatggtgaactaaaaattgaaagcaagattgaagagatggttgaaccactaagagagaaaatcagagatttagaaaaaagctttacccagaaatacccaccagtaaagtttttatcagaaaaggatcggaaaagaattttgataacaggaggcgcagggttcgtgggctcccatctaactgacaaactcatgatggacggccacgaggtgaccgtggtggacaatttcttcacgggcaggaagagaaacgtggagcactggatcggacatgagaacttcgagttgattaaccacgacgtggtggagcccctctacatcgaggttgaccagatataccatctggcatctccagcctcccctccaaactacatgtataatcctatcaagacattaaagaccaatacgattgggacattaaacatgttggggctggcaaaacgagtcggtgcccgtctgctcctggcctccacatcggaggtgtatggagatcctgaagtccaccctcaaagtgaggattactggggccacgtgaatccaataggacctcgggcctgctacgatgaaggcaaacgtgttgcagagaccatgtgctatgcctacatgaagcaggaaggcgtggaagtgcgagtggccagaatcttcaacacctttgggccacgcatgcacatgaacgatgggcgagtagtcagcaacttcatcctgcaggcgctccagggggagccactcacggtatacggatccgggtctcagacaagggcgttccagtacgtcagcgatctagtgaatggcctcgtggctctcatgaacagcaacgtcagcagcccggtcaacctggggaacccagaagaacacacaatcctagaatttgctcagttaattaaaaaccttgttggtagcggaagtgaaattcagtttctctccgaagcccaggatgacccacagaaaagaaaaccagacatcaaaaaagcaaagctgatgctggggtgggagcccgtggtcccgctggaggaaggtttaaacaaagcaattcactacttccgtaaagaactcgagtaccaggcaaataatcagtacatccccaaaccaaagcctgccagaataaagaaaggacggactcgccacagctgaactcctcacttttaggacacaagactaccattgtacacttgatgggatgtatttttggcttttttttgttgtcgtttaaagaaagactttaacaggtgtcatgaagaacaaactggaatttcattctgaagcttgctttaatgaaatggatgtgcctaaaagctcccctcaaaaaactgcagattttgccttgcactttttgaatctctctttttatgtaaaatagcgtagatgcatctctgcgtattttcaagtttttttatcttgctgtgagagcatatgttgtgactgtcgttgacagttttatttactggtttctttgtgaagctgaaaaggaacattaagcgggacaaaaaatgccgattttatttataaaagtgggtacttaataaatgagtcgttatactatgcataaagaaaaatcctagcagtattgtcaggtggtggtgcgccggcattgattttagggcagataaaagaattctgtgtgagagctttatgtttctcttttaattcagagtttttccaaggtctacttttgagttgcaaacttgactttgaaatattcctgttggtcatgatcaaggatatttgaaatcactactgtgttttgctgcgtatctggggcgggggcaggttggggggcacaaagttaacatattcttggttaaccatggttaaatatgctattttaataaaatattgaaactcaccagtcatggaaaaaaaaaaaaaaaaaaaaaaaaaaaaaaaaaaaaaaaaaaaaaaaaa

SEQ ID NO: 2379 - DNA, 2855 bp, Homo sapiens
gagtggcagttatatagaccggcggcggagcacgcgtgtgtgcggacgcagttgcgtgaggggtttgtactatcctcggtgctgtggtgcagagctagttcctctccagctcagccgcgtaggtttggacatatttgactcttttccccccaggttgaattgaccaaagcaatggtgatggagaagcctagtcccctgctggtcgggcgggaatttgtgagacagtattacacactgctgaaccaggccccagacatgctgcatagattttatggaaagaactcttcttatgtccatgggggattggattcaaatggaaagccagcagatgcagtctacggacagaaagaaatccacaggaaagtgatgtcacaaaacttcaccaactgccacaccaagattcgccatgttgatgctcatgccacgctaaatgatggtgtggtagtccaggtgatggggcttctctctaacaacaaccaggctttgaggagattcatgcaaacgtttgtccttgctcctgaggggtctgttgcaaataaattctatgttcacaatgatatcttcagataccaagatgaggtctttggtgggtttgtcactgagcctcaggaggagtctgaagaagaagtagaggaacctgaagaaagacagcaaacacctgaggtggtacctgatgattctggaactttctatgatcaggcagttgtcagtaatgacatggaagaacatttagaggagcctgttgctgaaccagagcctgatcctgaaccagaaccagaacaagaacctgtatctgaaatccaagaggaaaagcctgagccagtattagaagaaactgcccctgaggatgctcagaagagttcttctccagcacctgcagacatagctcagacagtacaggaagacttgaggacattttcttgggcatctgtgaccagtaagaatcttccacccagtggagctgttccagttactgggataccacctcatgttgttaaagtaccagcttcacagccccgtccagagtctaagcctgaatctcagattccaccacaaagacctcagcgggatcaaagagtgcgagaacaacgaataaatattcctccccaaaggggacccagaccaatccgtgaggctggtgagcaaggtgacattgaaccccgaagaatggtgagacaccctgacagtcaccaactcttcattggcaacctgcctcatgaagtggacaaatcagagcttaaagatttctttcaaagttatggaaacgtggtggagttgcgcattaacagtggtgggaaattacccaattttggttttgttgtgtttgatgattctgagcctgttcagaaagtccttagcaacaggcccatcatgttcagaggtgaggtccgtctgaatgtcgaagagaagaagactcgagctgccagggaaggcgaccgacgagataatcgccttcggggacctggaggccctcgaggtgggctgggtggtggaatgagaggccctccccgtggaggcatggtgcagaaaccaggatttggagtgggaagggggcttgcgccacggcagtgaatcttcatggatcttcatgcagccatacaaaccctggttccaacagaatggtgaattttcgacagcctttggtatcttggagtatgaccccagtctgttataaactgcttaagtttgtataattttactttttttgtgtgttaatggtgtgtgctccctctccctctcttccctttcctgacctttagtctttcacttccaattttgtggaatgatattttaggaataacggacttttaaagaagcaaaaaaaaagactgaatttccttgcttactttgcatatacagactggattttttttttttttttacagccatttccccaaaggaatgtcttgcatattactgacatttggtatgtttcattcattggaatatttcttattttctacgtgtttgaaaagcctgtaagaaatacaggatttgataatattttgaaggcaggaaaaacccaaattgtttcttctttgagagtcatgactaccttctggtgtggagaaattgccattggaaaatttgacaattttgattctcactggtatgtttaaaaactgaataaaaggaatagaatttttttttgataaaggatcacaaaacaattctaaaacctaactgtttttaccattgaaatttaaattgtgataataggttttaaatgtctagaatgcaactgataggcttttcttgaactgttagtttttttgaagtagttttttcatgtttaatttgtatttgtaaaaaaacaaaaagcaaaaaaattcccaaaacccagataacaaccagagcaaaactgttgtgccttctatttatctttgatttcagtcttggcaattgtttaaaaaaaaaatctagatttgttttattaggttcagagtatgtggggaattatagaatccctctttcatcactttgtgtatgtcttttgttaacatatttgttatgccttattctaaaattgagtctcaaactggaatgcctttgaagacagatgcttctatagaggttctttgacctaaatagttcagcatttgtatttttattctggtatctaatcagattcctaatcatagcccgtaagaaggaatgttactttaatattggactttgctcatgtgctcgtgtccgcatttttttttttcttaaaatcatagccatatggtaaattttctattttgttatggttctcttttattgatgggcatgcagtgggtgttacttggaaatggccaatttttattaaaatatttctggaagaaaatttaaaaaaaaaaaaaaaaaaaaaa

SEQ ID NO: 2380 - DNA, 6426 bp, Homo sapiens; identical to SEQ ID NO: 2314

SEQ ID NO: 2381 - DNA, 5288 bp, Homo sapiens; identical to SEQ ID NO: 2298

SEQ ID NO: 2382 - DNA, 3121 bp, Homo sapiens
ctctcgggtggactcccggagcggcggcggcggcggcggtggcagactgcgagtcacgtgcgacagaggaggcggagcacggcggccgggtgggtggagaaaacaaagcccccagctgtcagcagaggaaggaggcgacagcgccggagcagtgtcctgtttcccagaggaacagttcatttcaacagccagggagaaagcctggatgctcaagttggggaatggcggtcaatgtgtattctacctcgataacccaagagactatgagcagacatgacatcattgcatgggttaatgacatagtatctttaaactacacaaaagtggaacagctttgttcaggagcggcctattgccaattcatggacatgctcttccctggctgcattagtttgaagaaagtaaaatttcaagcaaagctggaacatgaatatattcacaattttaaacttctgcaagcatcatttaagcgaatgaacgttgataaggtaattccagtggagaagctagtgaaaggacgtttccaggacaacctggattttattcaatggtttaagaaattctatgatgctaactacgatgggaaggagtatgatcctgtagaggcacgacaagggcaagatgcaattcctcctcctgaccctggtgaacagatcttcaacctgccaaaaaagtctcaccatgcaaactcccccacagcaggtgcagctaaatcaagtccagcagctaaaccaggatccacaccttctcgaccctcatcagccaaaagggcttcttccagtggctcagcatccaaatccgataaagatttagaaacgcaggtcatacagcttaatgaacaggtacattcattaaaacttgcccttgaaggcgtggaaaaggaaagggatttctactttgggaagttgagagagatcgagctactctgccaagaacacgggcaggaaaatgatgacctcgtgcagagactaatggacatcctgtatgcttcagaagaacacgagggccacacagaagagccggaagcagaggagcaagcccacgaacagcagcccccgcagcaggaagagtactgacccaccccggctgctcttgacacttccattgtgtgtgggaacgtttcttctggagaattggaacatgtgtggccccaagctcaacagaaaccagttgttcccaatctgccgttaccatcaacgcactgttgcatatgccagccactgcgcttggttcccattttctttgccaaggtgtattagcggacggccctctggccacctacccgagagatcgtagggtcacatacatccaacttcaccacttggctgcttgagattggttctgctcttttcttcatttctttccagaacaactctttcccaccccaacaccactgccaccacccctctttttatcctggtgtgaaacaatggtaatttgatatatggtatttatattggcatttttcaacccagtgtcactagatgtcacacacatttgtggtgctttgatgtttgcaagtctaacctctgaacataaatttggtcaaataattggaacaaagggaaacagatacttgatatgaaagccataatgacggtgacttgtgtcgtgggggaaaacataaggtcattttctccctctactcacaatactaaagggaaaaaatggattcaaagctaggatttcagggcccagcagtgttcctccatcagcatgttagacaactacacagtatgttgttagttttgaaagacattcactcaaggaaaacaccatctcaactttgcccgctcaccatgtcccttgcccccatgtagcccatttcccaggttatgctcttttctttctcagggtcctctttggtgggcagccactccccgagatgttgccatcagttttctgcagtccaaagagggtatggttaggtacgggtcttcctgcctcattcctcttcctctttgtgtaggtttcagccacaaaactgtcattcactctaggggacccctactaaagggtaacttcaggtgtgcagccctgagctccaaggctctgcaccatgccacacacttgctgtaaggctagaagtgaagaccttattaataggagcataattgcgagggagaatcatggttctgcagtctggtgtagacactggaataacagcacagaaaaatctatgactcccaatatcttctagaataaagaattttccctctttaacacaagggccctccttgtcattgaccttagctaaaccatggcaattcataaatagaggaaacattaatgaattaaaagcattccttattttttaactaatatttgtacattttcttagtctctttccaagtctttgcctcttttttttctttatttttattttttcctttgacagatggtatcccttcctggatcattcatttcaccttggtttctaactttaggtttactttcacttgttatttgacttagcaggtgcaacaaaaacaagaaacaaatgtgcccaccccactttccgcttaactgaaaagcttaaaataaatttctgaattatgtatcctgaagctttgaaatttctttattaatcgatgaaatatgaattctaaattctagcattgaagcttttcaccaaaagaagtctctccaaaataaatcttttgcagcaaagtgatatttattgagttatgtggaaaagatggcttgtatttttcagattattacaacacactgtgcagaattagacagatgttccgtggtgtttggtttccctttcttctctctcctgctcactctgcattatagcagcagcttatttctctaaggctggacagcctggctctcggcagtgacgtcctcccacacctggtcacaagtagtagtggctgtgctatacccagcatcatgcttaacagcgtgttgcccttctgagcctgttgtactcactgatctctttaaaaacaaaaaatagctcttgtaaaaggtcacaataactctatgcacctgatactgcagtggttcctaggccattcttcatctgctctggacatctcagtcatacccaatgctcagtggatcatgaccaaactcctgtcatgtggatgcacgtgagtgggtagca

SEQ ID NO: 2383 - DNA, 2019 bp, Homo sapiens
tgtgcataggggtcgactgccgctgcggtgcatgagggcgcatgcgcagcggggccgtgggtgtacgcggcgcagcgcggcagtcctgatggcccggcatgggttaccgctgctgcccctgctgtcgctcctggtcggcgcgtggctcaagctaggaaatggacaggctactagcatggtccaactgcagggtgggagattcctgatgggaacaaattctccagacagcagagatggtgaagggcctgtgcgggaggcgacagtgaaaccctttgccatcgacatatttcctgtcaccaacaaagatttcagggattttgtcagggagaaaaagtatcggacagaagctgagatgtttggatggagctttgtctttgaggactttgtctctgatgagctgagaaacaaagccacccagccaatgaagcctgcaggtcctggctctggcatccgagagagactggagcacccagtgttacacgtgagctggaatgacgcccgtgcctactgtgcttggcggggaaaacgactgcccacggaggaagagtgggagtttgccgcccgagggggcttgaagggtcaagtttacccatgggggaactggttccagccaaaccgcaccaacctgtggcagggaaagttccccaagggagacaaagctgaggatggcttccatggagtctccccagtgaatgctttccccgcccagaacaactacgggctctatgacctcctggggaacgtgtgggagtggacagcatcaccgtaccaggctgctgagcaggacatgcgcgtcctccggggggcatcctggatcgacacagctgatggctctgccaatcaccgggcccgggtcaccaccaggatgggcaacactccagattcagcctcagacaacctcggtttccgctgtgctgcagacgcaggccggccgccaggggagctgtaagcagccgggtggtgacaaggagaaaagccttctagggtcactgtcattccctggccatgttgcaaacagcgcaattccaagctcgagagcttcagcctcaggaaagaacttccccttccctgtctcccatccctctgtggcaggcgcctctcaccagggcaggagaggactcagcctcctgtgttttggagaaggggcccaatgtgtgttgacgatggctgggggccaggtgtttctgttagaggccaagtattattgacacaggattgcaaacacacaaacaattggaacagagcactctgaaaggccattttttaagcattttaaaatctattctctccccctttctccctggatgattcaggaagctgacattgtttcctcaaggcagaattttcctggttctgttttctcagccagttgctgtggaaggagaatgctttctttgtggcctcatctgtggtttcgtgtccctctgaaggaaactagtttccactgtgtaacaggcagacatgtaactatttaaagcacagttcagtcctaaaagggtctgggagaaccagatgatgtactaggtgaagcattgcattgtgggaatcacaaagcaaatagtactccagaaagacaaatatcagaagcttcctattctttttttttttttttttttttttgagacagggtctttctctgttgcccaggctagagtgcactggtgatcacggctcactctagccttgaattcctgggcccaagcaattctcccacctcagcctcctgagtagctgggactacaagtgtgcaccaccatgcctggctaattttttgaatttttgtagtgatgggatctcgctctgttgcccagggtggtctcgaactcctggcctcaagcgatcctcccacctcgacctcccaaagtgctgggattacaggtgtgagccacctcgcctgggcccccttctccatatgcctccaaaaacatgtccctggagagtagcctgctcccacactgtcactggatgtcatggggccaataaaatctcctgcaattgtgtatctcagaaaaaaaaaaa

SEQ ID NO: 2384 - DNA, 2327 bp, Homo sapiens
ggagtttggggatgaggcagctgaagaacagagtcttgtgatggtggaaccaggacttcgttgttccttcattgtgtgggcagaagaggtggaggattttaggcgccacctggtcttgtccccactgcccagacaggcagggaatccctcttcttccttttgctgaatcagctggagaagaaagcccagcaggaggcctgctagcctcagcctcgggccctaccagggtcctaggtactggaatggaacttcgccgaggtcaccgctcaaacggccacaacgagggagccgatttagatcctctgggcctgttccttccttttctttaaacgtcccagtctagcttagaggaggacctgttttgttagataaatggcaagcaaaaaacgagaagtccagttacagacagtcatcaataatcaaagcctgtgggatgagatgttgcagaacaaaggcttaacagtgattgatgtttaccaagcctggtgtggaccttgcagagcaatgcaacctttattcagaaaattgaaaaatgaactgaacgaagacgaaattctgcattttgctgtcgcagaagctgacaacattgtgactttgcagccatttagagataaatgtgaacctgtttttctctttagtgttaatggcaaaattatcgaaaagattcagggtgcaaatgcaccgcttgttaataaaaaagttattaatttgatcgatgaggagagaaaaattgcagcaggtgaaatggctcgacctcagtatcctgaaattccattagtagactcagattcagaagttagtgaagaatcaccatgtgaaagtgttcaggaattatacagtattgctattatcaaaccggatgctgtgattagtaaaaaagttctagaaattaaaagaaaaattaccaaagctggatttattatagaagcagagcataagacagtgctcactgaagaacaagttgtcaacttctatagtcgaatagcagaccagtgtgacttcgaagagtttgtctcttttatgacaagtggcttaagctatattctagttgtatctcaaggaagtaaacacaatcctccctctgaagaaaccgaaccacagactgacaccgaacctaacgaacgatctgaggatcaacctgaggtcgaagcccaggttacacctggaatgatgaagaacaaacaagacagtttacaagaatatctggaaagacaacatttagctcagctctgtgacattgaagaggatgcagctaatgttgctaagttcatggatgctttcttccccgattttaaaaaaatgaaaagcatgaaattagaaaagacattggcattacttcgaccaaatctctttcatgaaaggaaagatgatgttttgcgtattattaaagatgaagacttcaaaatactggagcaaagacaagtagtattatcggaaaaagaagcacaagcactgtgcaaggaatatgaaaatgaagactattttaataaacttatagaaaacatgaccagtggtccatctctagcccttgttttattgagagacaatggcttgcaatactggaaacaattactgggaccaagaactgttgaagaagccattgaatattttccagagagtttatgtgcacagtttgcgatggacagtttgccggtcaaccagttgtatggcagcgattcattagaaaccgctgaaagggaaatacagcatttctttcctcttcaaagcactttaggcttgattaaacctcatgcaacaagtgaacaaagagagcagatcctgaagatagttaaggaggctggatttgatctgacacaggtgaagaaaatgttcctaactcctgagcaaatagagaaaatttatccaaaagtaacaggaaaagacttttataaagatttattggaaatgttatctgtgggtccatctatggtcatgattctgaccaagtggaatgctgttgcagaatggagacgattgatgggcccaacagacccagaagaagcaaaattactttcccctgactccatccgagcccagtttggaataagtaaattgaaaaacattgtccatggagcatctaacgcctatgaagcaaaagaggttgttaatagactctttgaggatcctgaggaaaactaaagtatatactgtgaaaactttgagaagataatacatatgttcacgtcaatatacaaccatttggcacagcttcctgggaggaataataagaaaaacatgctttggaggaaaactcaagatacaaaaatgaatggctatgcataataacaataaaaatgtattccccaaacaaaaaaaaaaaaaaaaaa

SEQ ID NO: 2385 - DNA, 5973 bp, Homo sapiens
gcagtcagcagaggagagcgccaggacgctacagcggctgaagaggcagtggcgcccgcggccgcagcgtcggggctggagcgatggcggcgaccgcggtggcggcggctgtggcgggaaccgagtcggcccagggtcccccgggcccggcagcgtcgctggagctgtggctcaacaaagccacagacccaagcatgtcggaacaggattggtcagctatccagaatttctgtgagcaggtgaacactgaccccaatggccccacacatgcgccctggctactggcccacaagatccagtctccgcaagagaaggaagctctttatgccttaacggtgctggagatgtgcatgaaccactgtggggagaagttccacagcgaggtggccaaatttcgtttcctgaacgaactgatcaaagtgttgtccccaaagtacctggggtcctgggccacaggaaaagttaaaggaagagtcattgaaatactcttcagttggacagtctggtttccggaagacatcaagattcgagacgcttatcagatgctgaagaaacaaggaattataaaacaagaccctaaactaccagtggataaaatcttacccccaccatctccctggcccaagagctccatctttgatgctgatgaagaaaagtccaagcttctgacaaggcttctaaagagcaaccaccccgaggaccttcaggctgcaaaccggttaatcaagaatttggtcaaggaggaacaagaaaaatcggagaaggtgtccaagagggtcagtgcggtggaggaagtgcgaagccatgtgaaggtgctgcaggagatgctgagcatgtaccgcaggccagggcaggccccgcccgaccaggaggccctgcaggtcgtgtatgagaggtgtgaaaagctgcggcccacgctgttccggttggcgagtgacaccactgatgacgatgatgcactcgcggaaattctccaggcaaatgacctcctcacccaaggagttctgctgtacaaacaggtgatggagggccgggtcacctttggaaacagagtgaccagctcattgggagacatccctgtctccagagtctttcagaatccagcaggctgcatgaagacctgccccctgattgacttggaggtggacaatggacctgcgcagatggggactgtggtgccatctttgcttcatcaggacctggcagccttgggaatcagtgatgctcctgttacaggcatggtttctggtcagaattgctgtgaggaaaagaggaatccctcctccagcacgctgccaggcggtggtgttcagaacccttctgcagacaggaatttgctggacctcctctcagcacagccagctccgtgccctctgaattatgtttcgcagaaaagtgtccccaaggaagtgccaccaggtactaagtcctctccaggttggtcctgggaggctggcccgttggctccttccccatcttcacagaatacacctctggctcaagtgtttgtccctttggagtctgttaagcccagcagcctgccgcctctcattgtgtatgaccggaatggattcagaattctgctccacttctcccagacgggagcccctgggcacccagaggtacaggtgctgctcttgaccatgatgagcacggctccccagcctgtctgggatatcatgtttcaagtggctgtgccaaagtcaatgagagtgaagctgcagccggcatccagctccaagcttcctgcattcagtcctttgatgcctccagctgtgatatctcagatgctgctgcttgacaatccacacaaagaacctatccgcttacggtacaagctgacattcaaccaaggtggacagcctttcagcgaagtaggagaagtgaaagacttcccagacctggctgtcttgggcgcagcctaacttttcacaagatggacccttcatttcaagcttaggctggcgttacttttgctgtctagtcaggactaatcacggtgtttcagtgcggagtgccaagagtcctatcctgacgtcaggctctgggtgtcaacctctgacttattctgcagatgctctgtgtgtgtgtgtgtgtgtgtgtgtgtgtgtgtgtgtgtgtgtgtgttcggggagagggtggtagcacagggcttgggatatcggcagtgtgggaaatgcgaagcatttctcatcatcatcatctctgctacagtcatgtttctgcatgtcagcgagcgacactgtccctgcctcaggttggaggttttatcagccaaagtgtttttttcatgtatcgttcgttccattcatccactctgtgccttgtcagcctttgaaaggcttggttgctcccaggctgctgttctcagggaccttaaaagggacctggttagtcttggggcagagagtatctacttgggcactctcttccaagaaagaccttgtctccattttcattagacaatgcttcttgtgtgtgttctggaagatcttctaaatggaatgcttgttgcactgttcccaggcgagtggctgccatgagacctgaggaccacacttgggggaccaatcatgtccttcaccactgtgccttagaatcgcccctggacagagttcctgggcagaggggaaagcagctcccaggccttactcaggcctcaggtccatgggttgggcagccagtctgggcccttctcaggatcctcatctccatcctcatcctcttccttcacagcatttacttggagctctttgtgacacaccatgtcagtcatgatgaatcggccaacagccagcccttgccagctgacgtcacagtctaagatgggaaactgtggtacagatagacatgaagagagcttagcagtgattgaggtggtgactaaatatacagtcattgaataaataccatgtagcaagtgtactttgtggagtgttgagtaagtggaaaatggaaagccagttgcatttagagatgataggcctaaagggaactgtcttctgtcgagaagtaaaggaaacttcatgaaggatgtagaagcttagctgcctcagagaagagagaacctgaagatctgaggcaagctggacaggagaggtggatatttgttgatggaagaattcaagtttataatcaattcccacttagcacctactgtgtgctaggaacttgaatgtgtatgtttgacaagtcctgcttggcctgatgggtgggagaaggaacctgagcctggctgagatggctaggcggagggctttgaagtccaagcagctgaactggctgggtgggtttctacctttgaaactgcaagacttgtttggagctcttaattacaatatctgatatttttacagtctgatcttttgacttctacatatagtggaaatctgccaatactaattggtggagatgggaactgtaaaagatcaagtatgctaattttaagcaaatgtaaaaactcataaaacaggtaaacagtggggtgatttcatttgccataattcacataagacgaattttaatctaaaagtactttcttgcttgtattctgtgtggcttttttttgttttttgaggccatatctcactctgtcactcaggctggagtgcggtggtataatctcagctcactgcaatctctgcctaccaggttcaagcgattctcgtgcctcagcctctcgagtagctgggactacaggcgtgagccagcacgcccagctaatttttgtatttttagtagagacaggatttcaccatgttggccaggctggtctcgaactcctgacctcaggtgatccgcctgccttggcctcccagagtgctgggattacaggcgtgagccaccgcacccggcctctgtgtagcttttataggctctgttactgttgcgtagtcttgaagaggtacccatcataatgacagcatctccctctgaagggttttggtcaaaatgggtgaatgagacttatacataaagacaggctttctcccctatagttaggaggtgaactcacacatgtgtacctgaacattcttgcttttgaggagacagactcccagtggtactactatgcttaggtgttggacaggataggggtaggaggagaggaggcaggctgctgtcctgaaagtggctgtggtttatggcatcactcccttctaatcagcaagtccagtggccacttagagcccagctcctacctcttcattcacttaacaagtagttattggctgtgcacagtggctcacgcctataatcccagcattttgggaggctgagtgggatgaccgcttgagcccaggatttcaagtccagcctgggctacatagtgagaccgtgtctctgtttttttaaaagctagttgttgaccagctaccctgagccaggcaccaccctgaaggagcttcttttcctctggggagaagcaaattcatgatgtgtgtgctggagatctggcactcatggccagtgctttccagtatcttgaactcttcgggggtcctgttgacccatttcgtgacctacctccgtgactgctctttttcctctgtctcttaagtgtgatggttttccagagtccaatcctcaggactttcccgtccacacacaggcctggtagtcaggtggctctaaaccattaggtgggttgtagacctctctcaagctgccacctccttgctgtcgccagatcgtatttcagtctgtcaggggttatctgtatctggaggttccactgttgcttcagtctcagttacttagaatggaacccagagtcctgcccctttccacctacatgctcttacttgaaagcacctgagacttattgggtccctgattcctgcttcgtctgtatccgcagagtagttgcatgtcatttggcctgttttctaaataatcccacatcatgtcctccctgcacttacattgccactgctctgatttgggcttttttttttttgggacaatgcctctgtcccaattctgagtaacagctctggttcttgccactaccagagttctctagcaaatctgagcatctgacagggtgaaaaattctgaatggcttcctgatgcctgactttatgggatcaaattcaagttgcacgctggcactcagtgcccttctggtatcatctgccaagaccagggcctgcttcaccacagccacaataaagtcctttcaagccctgataatgccatgttttgtcctaaccttttgctgcagttaattactcttcctattatcttccatgaacttaagactgggcaaaaatgtttccttatctgtgagccactctgaacacaaacaggtcatgaagatagtgttgaaaacaataaatgacaaccaaaagaaaagtgaatattacctagtacaaatagtgtaaattgagacagaaaatgttaaagctagaaagcaagggcaatattctagaatacaaatagtgcttgcctactacaatattaatcccaaatcctttaaatatacccattatagaagatgcttacccagcgtcaagagtataaaagtgggtttgtttgttttcttgagacagggctttgctctgttgcccaggctggagtgcagtggcgtgattgtagctcaatgcagccttgaattcctgtgttcaggcgatcctccggcttcagcctctggagtagctgggactacaggtgcatgctgccacgcccagctaatgttgcagtttttcgtaaagactggatctctgtgttacccaggctggtctcctgggctcaagcagtcctcctgccttgacctcccaaagtgctgggattacaggcatgagccaccatgtcctgaccccagtttgttttaaagccaagcgatgcaccaagatgtttgtgtgcacatctgacagtggtaatctttgggtcagggaattatagataaattttctttaaattttttctgagctttctaaaatcagctgaaaataaaaccttattttttta

SEQ ID NO: 2386 - DNA, 3138 bp, Homo sapiens; identical to SEQ ID NO: 2013

SEQ ID NO: 2387 - DNA, 4268 bp, Homo sapiens; identical to SEQ ID NO: 479

SEQ ID NO: 2388 - DNA, 1839 bp, Homo sapiens
agttgcactgtagcctcggcagtgaaccgggaggtactaccaggtcgccgtcgttgctccgctcgctctgagagagcatggccctgagaggcgtctccgtgcggctgctgagccgcggacccggcctgcacgtccttcgcacgtgggtctcgtcggcggcgcagaccgagaaaggcgggagaacacagagccaactggctaagtcctcgcgtcccgagtttgactggcaggacccgctggtgctggaggagcagctgaccacagatgagatcctcatcagggacaccttccgcacctactgccaggagagactcatgcctcgcatcctgttggccaatcgcaacgaagtttttcatcgggagatcatttcggagatgggggagttgggtgtgctgggccccaccatcaaaggatatggctgtgctggggtttcgtctgtggcctatgggctcctggcccgagagctggagcgggtggacagtggctacaggtcggcgatgagtgtccagtcctccctcgtcatgcaccctatctatgcctatggcagcgaggaacagcggcagaagtacctgccccagctggccaagggggagctcctgggctgcttcgggctcacagagcccaacagcggaagtgaccccagcagcatggagaccagagcccactacaactcatccaacaagagctacaccctcaatgggaccaagacctggatcacgaactcgcctatggccgatctgtttgtagtgtgggctcggtgtgaagatggctgcattcggggcttcctgctggagaaggggatgcggggtctctcggcccccaggatccagggcaagttctcgctgcgggcctcagccacaggcatgatcatcatggacggtgtggaggtgccagaggagaatgtgctccctggtgcatccagcctggggggtcccttcggctgcctgaacaacgcccggtacggcatcgcgtggggcgtgcttggagcttcggagttctgcttgcacacagcccggcagtacgccctcgacaggatgcagtttggtgtcccactggccaggaaccagctgattcagaagaagctggcagacatgctcactgagattaccctgggccttcacgcctgcctgcagctcggccgcttgaaggaccaggacaaggctgcccccgagatggtttctctgctgaagaggaataactgtgggaaagccctggacatcgcccgccaggcccgagacatgctgggggggaatgggatttctgacgagtatcacgtgatccggcacgccatgaacctggaggccgtgaacacctacgaaggtacacatgacattcacgccctgatccttgggagagctatcacgggaatccaggcgttcacggccagcaagtgagccgctccatcaggggcccgaaactctcaagcccctttctggagagatgcctggctggaccgtaggagcgctgtgctctgagcttagaaagggaggtggcggatggagtgggaagtgagagacactgatttttaaatatcaaaatttcccttctgaagtcgttcagatgtgttccttaaaaagaagatggaattctctgtagagcgtctcaatccacttttaaccatggatgagagcagactccatttaccctgaaatagcagcttctcttgagaggagagtgacatggaagcaactccgtctgctgcagctgaccccctcacactgagttcacagtgcgccctccctccctcccatctgggggtagtgccttatgctgggtgttggagcagagtgagggagaggaaaataaagacctgcacatctgaaaaaaaaaaaaaaaaaa

SEQ ID NO: 2389 - DNA, 1136 bp, Homo sapiens
ggagctgcgagccgcgaccgccgggagcgcacctgccccgcctccgccaggcggtccgcggggcatgcagcggaccgggggcggggctccgaggcccgggcgcaaccacgggctcccaggcagcctccgccagccggaccccgtcgccctcctgatgctgctcgtggacgctgatcagccggagcccatgcgcagcggggcgcgcgagctcgcgctcttcctgacccccgagcctggggccgaggcgaaggaggtggaggagaccatcgagggcatgctcctcaggctggaagagttttgcagcctggctgacctgatcaggagtgatacttcacagatcctggaggaaaacatcccagtccttaaggccaaactgacagaaatgcgtggcatctatgccaaagtggaccggctagagaagtcacctgcaccggtgcccgtgacgtacgagctgcccacactgtataggacggaggactattttcctgtggacgccggggaagcacagcaccacccccgcacctgccctcggcctttgtgagctttgtggtcttcccatcaggaacgctggaaagtgacattgtgtacacactgcagcttgggggttttttctttgtattgctgtttattttatattttaaaaatatttaaaaaaatgtcgagatggggtctcactatgttgtccagactgatctcaaactcctgggctcaagtgatccacccaccttggccttccaaagtggtgggattatgggcaggagcctccgtgcccaggctgctgccattttcaaatttcctccctgcctcatgtgagaccacagggtttggagaagcagttggaacccacgtgtggtgatgcctcccacatcggcctgcttggggttctacaggggttgagggaccaggcctggccggggctgatggacagtggggactttccttctctccatgatggctttgcaggggctccatggtccttctctctgtgatgggtttttgcacggggtgtgctctgccactgtggtgggtgggtggatgctgcttctgttgcctccagacctcggtgcccacagccttgaggatccttccaataaaggtgtcaagagctcaaaaaaaaaaaaaaaaaaaaaaaaaaa

SEQ ID NO: 2390 - DNA, 10238 bp, Homo sapiens; identical to SEQ ID NO: 74

SEQ ID NO: 2391 - DNA, 4238 bp, Homo sapiens
ttttttttcacccggaaaccgcggttgccggagcccgaactgaggcggcggcgggagcccggttggcgtctggtcttcgcgtcggccccgcggagccagacgctgcccccggcgcggggagaagatggtgcctagcggcctcgggcccgccacgcgccgccacgagtgagcccagcgcgaccgcgggcgtccgccgagcagctggcccggctgggcccggggcgcgcagctgcccgccggggcggggtggagctgatcagaataatgttcagcatcaaccccctggagaacctgaaggtgtacatcagcagtcggcctcccctggtggtcttcatgatcagcgtaagcgccatggccatagctttcctgaccctgggctacttcttcaaaatcaaggagattaaatccccagaaatggcagaggattggaatacttttctgctacggttcaatgatttggacttgtgtgtatcagagaatgaaaccctcaagcatctcacaaacgacaccacaactccggaaagtacaatgaccagcgggcaggcccgagcttccacccagtccccccaggccctggaggactcgggcccggtgaatatctcagtctcaatcaccctaaccctggacccactgaaacccttcggagggtattcccgcaacgtcacccatctgtactcaaccatcttagggcatcagattggactttcaggcagggaagcccacgaggagataaacatcaccttcaccctgcctacagcgtggagctcagatgactgcgccctccacggtcactgtgagcaggtggtattcacagcctgcatgaccctcacggccagccctggggtgttccccgtcactgtacagccaccgcactgtgttcctgacacgtacagcaacgccacgctctggtacaagatcttcacaactgccagagatgccaacacaaaatacgcccaagattacaatcctttctggtgttataagggggccattggaaaagtctatcatgctttaaatcccaagcttacagtgattgttccagatgatgaccgttcattaataaatttgcatctcatgcacaccagttacttcctctttgtgatggtgataacaatgttttgctatgctgttatcaagggcagacctagcaaattgcgtcagagcaatcctgaattttgtcccgagaaggtggctttggctgaagcctaattccacagctccttgttttttgagagagactgagagaaccataatccttgcctgctgaacccagcctgggcctggatgctctgtgaatacattatcttgcgatgttgggttattccagccaaagacatttcaagtgcctgtaactgatttgtacatatttataaaaatctattcagaaattggtccaataatgcacgtgctttgccctgggtacagccagagcccttcaaccccaccttggacttgaggacctacctgatgggacgtttccacgtgtctctagagaaggattcctggatctagctggtcacgacgatgttttcaccaaggtcacaggagcattgcgtcgctgatggggttgaagtttggtttggttcttgtttcagcccaatatgtagagaacatttgaaacagtctgcacctttgatacggtattgcatttccaaagccaccaatccattttgtggattttatgtgtttgtggcttaataatcatagtaacaacaataatacctttttctccattttgcttgcaggaaacataccttaagttttttttgttttgtttttgtttttttgttttttgttttcctttatgaagaaaaaataaaatagtcacattttaatactactctagttaggacagacttgtgcttttatcctgactaaaaagttaaatatttaagtcacatacatggtaaagatctaagtttcattttccacatggatgaccaggaacctggtcttgttggagctggcataggaggttctactgtcttgtcgtccactcttgtccctcccttctgttatcaaagttaaagcgcctcttcactcaaaagggcttcaaaatgtaaatggctctagagttagagtgactgtttgctcttctgctttctggaatgcagatgacagtatggaaagaaagaataatgattctatctaataggaaaggatttcttctttcttttttaaagagtgggtggattttctcccttttgttttgcttttattttcatgctactaacatatcttcagaaggaaatggcaactagtagatcagtaaaattacgaaaacgatgcctgcaaaatttgaaggaatgcaattctgatttgccatttatcagggaaaactgaaagcatttttcttataactttttttctttttctttttttttggaggggggaggcagggtcttgctctgtccctcaggctggagcttagctcagtgcagcctccaactcctgggctcaagcaatcctcccactttagcctcctgagtagctgggactacaggcgtgtgccagcgcgcctggctaattttaaaatttttttgtagagacagagtctccctctgttgcccaggctggtctggaactcctagcttcaaatgatcctctcacctcggcctcccaaaatcctgggattccaggcgtcagccactgctctcggccctcttacaccattttgtttgattgtctagtccctgtttctttttctttctaatccttattcatttaagcaaaaccatacattatcttttccagtcctttcttgtattcttactgtttttttaaaataactttttgccttaatagctcattgtcactaataacttctgtgttctcccaggcagtgttataacagaagggcaatgaaaacattggacatgaccatgagtgcttcctttccttaactctaggtttgtagtctgttttaaattaggattagttcctgcattctgaaatacattggcctagaacattttatcccaggcatttttgaatagaaaacagttgcgtgcttttattgaagattgttaaaataatcaccatagtaacttgatatgttagtatttttctttttccttttagtatgtttcaagtgcagtaatcgtacttgtctatccagtttctatgtatgatacgagttgcttacacgatgcatggctaacttgttaatttagttttctccttagagactttgagacccttaagagacaagattgagaaagagccatgtggcttggctctagaaacgtcattatcattaggaccatcagattttagattaagctgctattgaattaataaaatcccaatgaagcagagttatagggatagatttatagctggcagagtggtatcaaaggagaaaaacagtgaaaaagccaatttcactggttcgttcaatccagcttgttgctaatattagttacccttgttttaatgacagagagtggctggaatctgtagctaggggaggggcaacactgttagatgtgaggaaaggaagtgccaaaaatgcctggacagatggcttgtcccaaggccaggacacacactttaaaatccaacattcacctaagcaagtaattcttaaagatcttacagaaacgcagagtcaatcaggtttataaaggaaggctgaggggagagaggaggcctgggggcctggacgaagaggcctaggacctgaagagactccagcgagtctcgggaagcccaggggacctgtcaccatctgggcacttcccaggctcaatgctcagccagagtttgctggtggacctcaggattcgaagtgtgcaacagacggagtgcgcttgctgttcagggcggccccgtgcaggagcaccagctcaccctcaggcatctcggactggagggccagcagaaggtcagcaacttactcttaaaacgattgtttcggatcatattgatctctttcctttttccttttgtcctttcactgtatgacttgaatcagttttgattctatttgtaagtgtttcttgtcgtgaggcacctgccatgtctgttgcgttttcctcggcagcgtgtagggcttcagcttcctgggttttcacccttcctgcaggcactgtggggtcctgagggccagtgggtccatttcacctcttgctgcatgatggtcagtagctgatctgttatggcattcacttccagattaattttccgtgtttgaagtatgtgcatatgtgctttacagaataaaacatctgaattta

SEQ ID NO: 2392 - DNA, 2468 bp, Homo sapiens
gaggttccgggctccgggatgaaaggagggaacgcaggtgagaaagcgagacaggcaggtagggaaatcgtgaggtgagcgtggtcctagctccttgtggcagagcctagagagaaggcgaggacgctgaagaaccaggcggacagctggcagagagagaagttggctagcatggaatcaccagaggagcctggagcatccatggatgagaactactttgtgaactacactttcaaagatcggtcacattcaggccgtgtggctcaaggcatcatgaaactgtgtctagaggaggagctctttgctgatgtcaccatttcggtggaaggccgggagtttcagctccatcggctggtcctctcagctcagagctgcttcttccgatccatgttcacttccaacctgaaggaggcccacaaccgggtgattgtgctgcaggatgtcagcgagtctgttttccagctcctggttgattatatctaccatgggactgtgaaacttcgagctgaggagttgcaggaaatttatgaggtgtcagacatgtatcagctgacatctctctttgaggaatgctctcggtttttggcccgcacagtgcaagtgggaaactgccttcaggtgatgtggctggcagatcggcacagtgatcctgagctctatacggctgccaagcactgtgccaagacccacctggcccagctgcagaatacagaggaatttctccacttgccccaccgcttactcacagatatcatctcggatggagttccgtgttctcagaacccaacagaggcaatagaagcctggatcaactttaataaagaggaaagagaggcttttgcagagtcactcaggacaagcttgaaggaaattggggagaatgtgcacatttacctgattgggaaagagtcatctcgtacccactcgttggctgtgtccttgcactgtgcagaagatgactccatcagtgtaagtggccaaaacagtttgtgccaccagatcactgcggcctgcaagcatggtggagacttgtatgtggtgggagggtccatcccacggcgcatgtggaagtgcaacaatgccaccgttgactgggagtggtgtgctcctttgcctcgggaccggctccagcacaccctggtgtctgtgcccgggaaagatgccatatattcactgggtggcaagacactgcaagataccctctccaacgcagtcatttattatcgcgtaggtgataatgtgtggacagagacaactcagctagaggtggctgtgtcaggggctgctggtgccaacctcaacgggatcatctacttactagggggggaggagaatgatctggacttctttaccaaaccttcccgactcatccagtgctttgacacagagacagacaaatgccatgtgaagccctatgtgctgccctttgcaggccgcatgcacgcagctgtgcataaagatctggtgttcatcgtggctgaaggggactccctggtgtgctacaatcccttgctagacagcttcacccggctttgccttcctgaggcctggagctctgccccatccctctggaagattgccagctgtaacgggagcatctatgtcttccgggaccgatataaaaagggggatgccaacacctacaagcttgaccctgccacttcagccgtaactgtcacaagaggtattaaggtgctgcttaccaatttgcagtttgtgttggcctaaggctgtggggaggggaggagaactgctcactccttttccctccccatacaaactcaaagtcccctgggccccaattcagagttatgttttttttggcacatactagaaaggcagtgcctcagcccttccctgaatccatggaggtgttctgtttggggctttttagactgctgctgctcagctggttgcttgaactgacagtaggccagcctgttctctgccattccctagtcatcctgtgcctcaccacagcttgcttagagcaagccttttctcagaccttaggcacagcctctcctctttacctgatcaatgttaaatgtaagcacccctgatcccaggacataaggaaagatgcccaattgtacttttgttctatagcctgtgaaatggctagttgatcatttttccacaaagaattaggtgttaagagttttccttcaggctttacttaggagaatggactaagctgaaggtgtacttcaccagcaagagtcaactctagaattcaggatgttccttctattgttttcttatccatctgtcaggaaatgtaactttggttttatttttggcttattccaaggggtaagccagaaaatagaaatgattatttctgattaatagcagaaactttttcaatctcaaatatataaggtgtctgctcttttaaaagctctaagctaagtcaagagctaggaactgttgatacaaataaaagtttttgaagggaaaaaaaa

SEQ ID NO: 2393 - DNA, 4098 bp, Homo sapiens
gagaattggaaggcggcagtgaagcggaagccattactctctggagtcgattgccccgagacacatgggccaaggaggggtcagcggcgaattctttcggcctgttggggacccctcgtgtccccacgccagactggacctcccgtatgaacttctcttcgcatcggcggcggcttccgtcacctccgctcccccgatcctattcccagtcgtatgccagcttggagagtcacgtgagagcaagagagtagctttctggttgtcctggtgccctgctcaggcaaactgactgccattctctgaggatggcagctctgtcccccacatttgccacgtccacccaggattccacctgtctccaggactcagaatttcctgtttcttcaaaagaccattcctgtccccagaatttggacctgttcgtgtgcagtggtctggagcctcacacacccagtgttggttcccaggaatcggtgactttccaagatgtcgctgtggactttaccgagaaggagtggcccttgctggattcttctcagagaaaactgtacaaagatgtaatgctggagaactacagcaacctcacttcactggggtatcaggtcggcaaacccagcctcatctcacacttggagcaggaggaggagccgaggacagaggagaggggcgctcaccagggcgcttgtgcagattgggagactccatctaaaaccaagtggtcacttcttatggaagatatttttgggaaggaaacgcccagtggtgtgacgatggaaagagccggtcttggagagaagtccactgaatacgctcacttgttcgaagtctttggcatggaccctcatctcactcagccaatgggaaggcacgctggcaagaggccctatcaccgccgcgactatggggtagcgttcaagggcaggccgcacctcactcagcacatgagcatgtacgacgggagaaaaatgcatgaatgtcatcagtgccaaaaagccttcaccacgagcgcgtccctcacacggcacaggagaatccacaccggggagaagccttacgagtgcagcgactgcgggaaagccttcaacgacccttcagcccttaggagccacgcaagaactcacctcaaagagaagccctttgactgcagtcagtgtggaaatgcattccggaccctctcggccctgaaaatccacatgcgagttcacactggcgagaggccttacaagtgtgatcagtgcgggaaggcttacggccggagctgccacctcatcgcacacaagagaacgcacaccggagagaggccctacgagtgtcacgactgtgggaaagctttccagcacccctcccacctcaaagagcacgtgaggaatcacacgggggagaagccctacgcgtgcacgcagtgcggcaaagccttccgctggaagtccaactttaatttgcacaagaagaaccacatggtggagaagacctacgaatgtaaagaatgcgggaaatcctttggcgatctcgtgtcccggaggaaacacatgaggattcacatcgtcaagaaacccgtggaatgtcggcagtgcgggaagaccttccgaaaccagtccatccttaagactcacatgaactctcacactggagagaaaccatacgggtgcgatctctgcgggaaagctttcagcgcgagttcaaacctcaccgcacacaggaagatacacacgcaagagagacgctacgaatgcgccgcctgcgggaaagtcttcggtgactatttatcccggcggaggcacatgagcgttcaccttgtaaagaaacgagttgagtgtaggcagtgtggcaaggccttcaggaaccagtcaacgctgaagacgcacatgcgaagccacacgggggagaaaccgtacgaatgcgatcactgtgggaaggccttcagcataggctccaacctgaatgtgcacaggcggatccacaccggggagaagccctacgaatgccttgtctgcgggaaagccttcagcgaccactcatccctcaggagccacgtgaaaactcaccggggagagaagctctttgtgtcatccgtgtggaaaaggctccagtgagcgcgcctgctttagagacacaggatgattcagaccggaaacagacctcgtgggtgtaagaggaagcctctgtgagctcgcaccttactgggtgcaaaagaatccacggaacttgggagaagtccagttcctgtaaaaactgggaagacgaggcgttctcatcccataggaggtttgtgagaactcacgccgggggtgaaaatgtacgtctgtagcatggagaagccttcagggtacattcagctcttaacaaacacaggaggacttaatggcagcttggcatttaatgtcaaaatccaagccgtggcatttaatgtcaaaatgacttcagaccacttctagccttctgggcccatgagtaataatgagcacactagggagcatctctgtaaacacagtggctggggaaacccttcctagtctcacttgattcctcatgacggaaatcacactaaagagagaaatcagtgaagtaaggaacgtggaaggtcatgaatgggccgcaaaccacggccagctgcttgtctttgtatggcttgccagctaacaatagtggttccatctttaaggaagaagaatgtttgatggagaaaatttgtggccaatgaagtctgaaatacttcctgtcatctgcccctttccagaaaaacttggccgacccttggtctacagcacgggttctcagtcgggcgacgatttggctgtctaggcgtcatttggcaatgtctagagacatttttggtagttagaatggggggaagatactcctgacttgtaataagaagacatcagagatgctgctaagtcggctccagcacacaggagccccccacaacgaagagttagtgcccccaaacgtcactgttgctgaggttgaaaataatcatgcagtcattcctcaattactgcctgcagcaattcctccatttttatgaatcttgtgagcacttacgctaggagaaatttcttttacaaaacttttaaaatacaattagtgctgataattcctatgtggaaatgattccagccatggtcccctcacttgagcatgtgaatattctcacggagagaagccccagcgagattttccggtgaatacgggattgcacttactctttcatcacggaaacagaccccccgagagaagccccaacgagattttccggtgaatacgggactgcacgtactctctcatcatgaaaacagagccccgttcataaatttttcatctttatttttaaggttatactcctctaaataacccttaagcctcatcaagaaaggtttgtttatagtatttttactatagcttcatccttgataacgtcctaatttccttctggacaacctccttgaccaatggcatattgagatctatgtgacatgaggatatttctcagtaccactttgttactggtacctgatgcacacggattgcgaccagagcatgatgcctccatcaagtggtaatatgtttgcagcctgctgtccagccaagagtgacagatacttctagtgacttccccggtatccactctcatcttcttccaatatcaagagaatccaggttctgtcagattagtaaggtgtgctaatctaaattttaaaaaatctcttacaggttttcttgcagctggtaccatccatgtctcacagccctggccactgacagatcagcagatgtcaccacatgggcttctgagaaagctcttgaatggggatcgttcttaaacatgaattcctccctgtatgttttgttctttgctttacttttcaccttgcaaagagatccagtacctagtattggaagatccaccttaacgaccgtgcatatgaaaaccacagtctaaggaagtgactgcagaaagctcacagcgaccctggcctcccctgtggcctctttgagtgtctgcagcagccctggacttccagacttctatcacatgagaaaaaataaaactgattattggtttaagctgctaaaaaaaaaaaaaaaaaaaaaaaa

SEQ ID NO: 2394 - DNA, 3222 bp, Homo sapiens; identical to SEQ ID NO: 1741

SEQ ID NO: 2395 - DNA, 3277 bp, Homo sapiens
gcgtgcacgctgacgccgcgcagtctcgtcccctgccgccgccgtcgccgctgctgtcgccgccgccgccgccattggagtcgacgcctcctcagtgcgtccgcgtcccgggctcaccgccgctgccgcctcgccaggggcccgcgcgcccagcagccgccgccgccgcccggccggcgcccggggaattggcggcggggcccggggccgcgcgagctagggtgacaggcccggcctctaggggaggcccgagccggcgggcgccccggccccgcgtctagttgttcatgaagcatgtcggccaccagcgtggacacccagagaacaaaaggacaagataataaagtacaaaatggttcgttacatcagaaggatacagttcatgacaatgactttgagccctaccttactggacagtcaaatcagagtaacagttacccctcaatgagcgacccctacctgtccagctattacccgccgtccattggatttccttactccctcaatgaggctccgtggtctactgcaggggaccctccgattccatacctcaccacctacggacagctcagtaacggagaccatcattttatgcacgatgctgtttttgggcagcctgggggcctggggaacaacatctatcagcacaggttcaattttttccctgaaaaccctgcgttctcagcatgggggacaagtgggtctcaaggtcagcagacccagagctccgcgtatgggagcagctacacctaccccccgagctccctgggtggcacggtggttgatgggcagccaggctttcacagcgacaccctcagcaaggcccccgggatgaacagcctggagcagggcatggttggcctgaagattggggacgtcagctcctccgccgtcaagacggtgggctctgtcgtcagcagcgtggcactgactggtgtcctttctggcaacggtgggacaaatgtgaacatgccagtttcaaagccgacctcgtgggctgccattgccagcaagcctgcaaaaccacagcctaaaatgaaaacaaagagcgggcctgtcatggggggtgggctgccccctccacccataaagcataacatggacattggcacctgggataacaaggggcctgtgccgaaggccccagtcccccagcaggcaccctctccacaggctgccccacagccccagcaggtggctcagcctctcccagcacagcccccagctttggctcaaccgcagtatcagagccctcagcagccaccccagacccgctgggttgccccacgcaacagaaacgcggcgtttgggcagagcggaggggctggcagcgatagcaactctcctggaaacgtccagcctaattctgcccccagcgtcgaatcccaccccgtccttgaaaaactgaaggctgctcacagctacaacccgaaagagtttgagtggaatctgaaaagcgggcgtgtgttcatcatcaagagctactctgaggacgacatccaccgctccattaagtactccatctggtgtagcacagagcacggcaacaagcgcctggacagcgccttccgctgcatgagcagcaaggggcccgtctacctgctcttcagcgtcaatgggagtgggcatttttgtggggtggccgagatgaagtcccccgtggactacggcaccagtgccggggtctggtctcaggacaagtggaaggggaagtttgatgtccagtggatttttgttaaggatgtacccaataaccagctccggcacatcaggctggagaataacgacaacaaaccggtcacaaactcccgggacacccaggaggtgcccttagaaaaagccaagcaagtgctgaaaattatcagttcctacaagcacacaacctccatcttcgacgactttgctcactacgagaagcgccaggaggaggaggaggtggtgcgcaaggaacggcagagtcgaaacaaacaatgagggcgaaccagtttcttacatgttctaacgtttgactttgaaaacagtttaaaacacgtgtgcttggtcagctccagtgtgtcgtcccgtgcgggggttgagtgttgcatctttgcctttcttgtcgttgatttttgcccagatggatctgcatttatttgtactttttctatgtattataatcctgtagaagtcactaataaaggagtattttttttgtcagcttatcaatcagactgatctaatgtgaaatgtaagtatccttaaaaacaaagcatctattttggcagaaattgtgttcttaaattcagtcatttgatattctgtgagacttcatatttctcatccctttattgctttttagcaaacataagaaaccatgagtcattttgtcatttagagtattctgataaaatctcttgaaaatactgaaatcaaaaggttaatgattttttgttcattctgatttgtcattttattatctgttatcggtctaaagtgctaatttacccatttgatttttctgctagacagataacttttaatttttcaaatttggcagacactttttttttttttttgaaaatctttccttccagatctgttgcccactgaacagccacccgtccctcactgtcctggtgtccgattgggctggatggtgttggggcatgatgtgtggaggaactggaaggtgctttaggtctggttcagggtcgggcattctttgttgtttgcacatctttttaaattttacaccttttcttaagaattctaatgccgtcttaagtttttataccaataatgctgagctttaagtgtaggatctggtagtacagacagtgtgatggatgatgctgctggttgtaaatttcatcgtgtgtgtctaattttttttcctgttgaatgggtaaaaacaaaacaaaactttttttagaagatgaatttgctgtcatgttttgtggaatgagggaccgttgagctcactaccacctggagtttgagttgaagcatgaaaatggtgcccatgcctgacgctccagcgcctggatctgcacgtgcccttgtagaggatccttaccgtcctagagagcagacgctttctgaaaactacttgctccaaaagaccctctgagttaacgtttcagctgtatcattagacttgtatttagagcgtgtcacttcctctgaactgttactgcctgaatggagtcctggacgacattgggtttttcctctaggagaatacaagccttaataaacaatactatttagcaaaaaaaaaaaaaaaaaaaaaaaaaaa

SEQ ID NO: 2396 - DNA, 353 bp, Homo sapiens
atggacatgagggtccccgctcagctcctggggctcctgctgctctggttcccaggtgccaggtgtgacatccagatgacccagtctccatcctccctgtctgcatctgtaggagacagagtcaccatcacttgccgggcaagtcagggcattagaaatgatttaggctggtatcagcagaaaccagggaaagcccctaagcgcctgatctatgctgcatccagtttgcaaagtggggtcccatcaaggttcagcggcagtggatctgggacagaattcactctcacaatcagcagcctgcagcctgaagattttgcaacttattactgtctacagcataatagttaccctcc

SEQ ID NO: 2397 - DNA, 1863 bp, Homo sapiens
agtgacgtcacggcccgtggcgcccttcgtggactgggctgtacggtgcgcgtgacggctgcgtgcggcgggaatcatggctgctcgcagagctctgcacttcgtattcaaagtgggaaaccgcttccagacggcgcgtttctatcgggacgtcctggggatgaaggttctgcggcatgaggaatttgaagaaggctgcaaagctgcctgtaatgggccttatgatgggaaatggagtaaaacaatggtgggatttgggcctgaggatgatcattttgtcgcagaactgacttacaattatggcgtcggagactacaagcttggcaatgactttatgggaatcacgctcgcttctagccaggctgtcagcaacgccaggaagctggagtggccactgacggaagttgcagaaggtgtttttgaaaccgaggccccgggaggatataagttctatttgcagaatcgcagtctgcctcagtcagatcctgtattaaaagtaactctagcagtgtctgatcttcaaaagtccttgaactactggtgtaatctactgggaatgaaaatttatgaaaaagatgaagaaaagcaaagggctttgctgggctatgctgataaccagtgtaagctggagctacagggcgtcaagggtggggtggaccatgcagcagcttttggaagaattgccttctcttgcccccagaaagagttgccagacttagaagacttgatgaaaagggagaaccagaagattctgactcccctggtgagcctggacaccccagggaaagcaacagtacaggtggtcattctggccgaccctgacggacatgaaatttgctttgtcggggatgaagcatttcgagaactttctaagatggatccagagggaagcaaattgttggatgatgcaatggcagcagataaaagtgacgagtggtttgccaaacacaataaacccaaagcttcaggttaacggaagacatgatgcagagcaagcctctgtgattcctgcccagcacctgtgaggcctgacgtgtcagttcccaataaatgctcttctgatttgtttcccgtacaggcaaggaggcttgggtagtgcagatttgtgtatttcaatctttgaaagctctgatgtaatttagaaatgaaatccaatcatgagtccaggtagagaacgcctgctgtaatctacactgttgctgggactgcgcattctgtatataactgtgttggatgagtgacagatgattgtccagactaggacagcggcatgaacatgactttggttgggattgcggatagttagggttacctctgaatcgtgtagcttttatgagagcagctgtgcaagtgaatccacattaatgccttgtcgtggtgccattcccagcgcctgacgatacgctcttctattgtcttattctggcaggttttgacgttttaaattttttaaagaaattttattccttggaccaaaaggtttggttaaccacccccctcttacttgctttcacattttgagtgtccagaggaaacagaaaggaatgagtgtgtgacgttgctgcacgcctgactctgtgcgagcttctttctgtgtatatattttgttttatttttttccgtgtatatttttaatcccgacagaacatcatgtgagatttctttaaaatggattaaacgatttcttcagcctgaaaaaaaaggttttgaaaatgttttcttgtagttttgtttggttctaaacaacaaataggttttaatcactcgaaatggaattatattgtgtattcattgaataaattttttttgaaagtaagcttctgaaatcaagctgtgaaaaaaaaaaaaaaaaaaaaaaaaaaa

SEQ ID NO: 2398 - DNA, 4232 bp, Homo sapiens
cggcggagtggcgagaggcgagaggcggcggaggcggcggagctggggggggtgggaggggggggagagtgagtgagtggcagagtgagtttacccctatgagactgtgagaggcccggggcctacctcaaaggagcggggtcgcgaagctagctagcagcggcccccctccaggtccccgggcccggcggcgcggcggcggcttggttgtgaagaggcggggaagcgggtgtccggtccccgccatggagggcatggacgtagacctggacccggagctgatgcagaagttcagctgcctgggcaccaccgacaaggacgtgctcatctccgagttccagaggctgctcggcttccagctcaatcctgccggttgcgccttcttcctggacatgaccaactggaacctacaagcagcaattggcgcctattatgactttgagagcccaaacatcagtgtgccctctatgtcctttgttgaagatgtcaccataggagaaggggagtcaatacctccggatactcagtttgtaaaaacatggcggatccagaattctgatgtcatctgggtgattctcagtgtggaggtgggtggacttttaggagtaacgcagcagctgtcatcttttgaaacggagttcaacacacagccgcatcgtaaggtagaaggaaacttcaacccttttgcctctccccaaaagaaccgacaatcagatgaaaacaacttaaaagaccctgggggctccgagttcgactcgatcagcaaaaacacatgggctcctgctcctgacacatgggctcctgctcctgaccaaactgagcaagaccagaatagactgtcacagaactctgtaaatctgtctcccagcagtcacgcaaacaacttatcagtagtgacttacagtaaggggctccatgggccttaccccttcggccagtcttaaacgggtgtcagcaagaagaaaaattaacaaaagacagaaggcctgactttggggggttagggcaaggggttcctctggattgcagaccacatcgcacagacccctggctctgaccccctctcatcccggaagaagaggaagaagcagaacagactagttttgagtaaactcagtatgcatgtgtgaatgctgaatcacaggaatggtgttgaggctaccaagaagaaatccatgcagccactttgggttttgttataggcatcagtctaacaagtcattaggtcactcgggaagggggaaaaagtttaaaatgggggaaaaaaagccatctttttaaacaaaaattattttgcctacagaaaggttgtagttttgagcacatgttaatttttttccctctttccccacttttatttttttaaataagggataacatattctttatagaatagtgcttgttctggaagagattcaggtgaaaagttggcgtggcatgtttgaggactctgcggatcagtgctacaggagtacatctgccctgccacatgactccagaagtctctgaccccatttgtttttaatggcatcagccaatgagttatcacccttttcctcctcttttctctttaatcttctgttgatttacacctttgacatttgtattcgtcaaccctgtggcttgttagcatcagaacctctctgaagaccaaacttccctgtgtggccagcagaggaagccttgaggatagatctcgggtgacgtgggattttctaagcctgagaggtgtccttctgcacacccttgtaacaattaaaattgcttttcttccatgtttctcttggcagagagaaatgccatcatgcttactgctcttttggattcttcatgcagtggcttcccatttgctctgggaacagtgcctctgtgctggttatatgtatgcaccacatgtgcacacacgggtgtcggtgcaactcaccagcaggtgtgcagtaggcaagcttgaaggtggcccatgcttctctgttgtcacacaacacctttccctgtttctcttcagttgtcctctgatattttcacagcctgttagtggcggctgatctgtagaggtatgaaaatacagccccaaagggggaatttgtcatggggaagggccagccactgactacttgatcttggagaccacatttagatggaaatgagaggacctccacagccccgcctccctgccaggatgctagattattggctgggaggtgggcaagtggcagcccagctgaagcaagaggctgattgactggctgctcactcaggcaggtggcctgccctggcatcctgtagattctgagcaggttgagatgtggatatctccatgggaagcttgaaccaggctagaacagctgtctgccaaagatacaagaatatgcaaagtccctcttacccccctccttccctcaagtcttagttggtttgagagccagggatatggatccagggtgctgttgcagggtcacctgcctgttaccacacccccatccagctgggtggtgggtgagggtgtgagacaggcagggagaccaggtaatgagtggctgcaaggagtcatatagcctgggtgtgggtgagggtctgcctgcctgtttctgtctgggtgtctgagttccaaaaaatgtgtgttgtttgttcctcctcatcctcttctgagactgttgtttttttagagcttgattgtgggagaaaagcttgtgtgaaattccctcttcacctccccaccccccaaaaaataaaagggggcataaactttattccactggagaagccctgggggtggctggagccagcctgctgagaagcgtggtgcagctgggtctgggacttcactagagcttactctggagcacctattttctgtgcacatgggagtgctccactccctagcagagcagagggaagtctctgccaggtacccacgccacaggcctcaggatggctttttgtctgagggcctcattaggcccagactgctgctgctggtaccagtctcctgagacactgcctccctggagcccatgcatgcccagctgttcttactgcttagtagccttgaagcagcacatctccactgtccctggcaggattgtgggaggcttcacaacccctgctttcctgacttcctcttctgcccaacactgggtgccccttcccagtttcccagcaggggcttcatgggccaccgtcagtgggtctgggcctgccagagtcgtcttgctcttcctcttgcttctaggcaaccacacttggcaagttaaatgtcccaagcaccttgtctcccttcccaagaacaaaccatttctgtgcacatccttggaggcgagatgagctccttgcagagggccagagtaagtgcaagtcatggagtgcaggcagaggggtccatggcttccccagcccagggagggtatcagtatcattcattctctctcccctcactggtatgggttcagagcaatgcctagggcccctctctgctcccctgcctagtggggtggtagtggctacctctcagccccaatagtccctgctcctcttagaatcttcaccaagtggcaggccacctctgggcaggaccacctgcgtctggcacccaggaggtgaggcagacaccatggttaggtgatagggtctgaacccagttggggagacagaggggttcagacttgggaagaatctgtcagtgtgcatggagtgaggtgtgtgtgtgtggatggatgtgcacgtgtgcatgctttttttctttttgccgtgaggacagttgaatttggggcatttttctacaagaagcagtcagccttctctcccccataaggactggctgtaaccttaagcccatcaaagttacttccagcctggagagaacctcaccaaacagctggtgtggcctgagggtggccatggtgggaaatgggcatgagaataaatacctccccaaattcaatctgagcccagcaggagaggatggtagggttgccagggctcagaagtgcaagctgattactcaccccaccctgcctcgccgcacctttcctttgtttccttgggtgaatgcaggagcagcagtggctgcccttcccacctggacagtggtgtgtgtagaaagccagctggatgtttgtggtggggcctcatggtgcctaggaggagataaagatgaggaggtttttccttattgtataaatgaatatttgtatgattaaattaacacacacaccaaaaaaaaaaaaaaaaaa

SEQ ID NO: 2399 - DNA, 2967 bp, Homo sapiens
ccggaactgcagttgctgctgcagctgaggtacagcggcggtttctgaggttcttcactcgcgactgacggagctgcggtggcgtctccacacgcaaccatgaagttgaaggacacaaaatcaaggccaaagcagtcaagctgtggcaaatttcagacaaagggaatcaaagttgtgggaaaatggaaggaagtgaagattgacccaaatatgtttgcagatggacagatggatgacttggtgtgctttgaggaattgacagattaccagttggtctcccctgccaagaatccctccagtctcttctcaaaggaagcacccaagagaaaggcacaagctgtttcagaagaagaggaggaggaggagggaaagtctagctcaccaaagaaaaagatcaagttgaagaaaagtaaaaatgtagcaactgaaggaaccagtacccagaaagaatttgaagtgaaagatcctgagctggaggcccagggagatgacatggtttgtgatgatccggaggctggggagatgacatcagaaaacctggtccaaactgctccaaaaaagaagaaaaataaagggaaaaaagggttggagccttctcagagcactgctgccaaggtgcccaaaaaagcgaagacatggattcctgaagttcatgatcagaaagcagatgtgtcagcttggaaggacctgtttgttcccaggccggttctccgagcactcagctttctaggcttctctgcacccacaccaatccaagccctgaccttggcacctgccatccgtgacaaactggacatccttggggctgctgagacaggaagtgggaaaactcttgcctttgccatcccaatgattcatgcggtgttgcagtggcagaagaggaatgctgcccctcctccaagtaacaccgaagcaccacctggagagaccagaactgaggccggagctgagactagatcaccaggcaaggctgaagctgagtctgatgcattgcctgacgatactgtaattgagagtgaagcactgcccagtgatattgcagccgaggccagagccaagactggaggcactgtctcagaccaggcgttgctctttggtgacgatgatgctggtgaagggccttcttccctgatcagggagaaacctgttcccaaacagaatgagaatgaggaggaaaatcttgataaagagcagactggaaatctaaaacaggagttggatgacaaaagcgccacctgtaaggcatatccaaagcgtcctctgcttggactggttctgactcccactcgagagctggccgtccaggtcaaacagcacattgatgctgtggccaggtttacaggaattaaaactgctattttggttggtggaatgtccacgcagaaacagcagaggatgctgaaccgtcgtcctgagattgtggttgctactccaggccggctgtgggaattaattaaagaaaagcattatcatttgaggaaccttcggcagctcaggtgcctggtagtggatgaggctgaccggatggttgagaaaggccattttgctgagctctcacagctgctagagatgctcaatgactcccaatacaacccaaagagacaaacgcttgttttttctgccacactcaccctggtgcatcaggctcctgctcgaatccttcataagaagcacaccaagaaaatggataaaacagccaaacttgacctccttatgcagaaaattggcatgaggggcaagcccaaggtcattgacctcacaaggaatgaggccacggtggagacgctaacagagaccaagatccattgtgagactgatgagaaagacttctacttgtactacttcctgatgcagtatccaggccgcagcttagtgtttgccaacagtatctcctgcatcaaacgcctctctgggctcctcaaagtccttgatatcatgcccttgaccctgcatgcctgtatgcaccagaagcagaggctcagaaacctggagcagtttgcccgtctggaagactgtgttctcttggcaacagatgtggcagctcggggtctggatattcctaaagtccagcatgtcatccattaccaggtcccacgtacctcggagatttatgtccaccgaagtggtcgaactgctcgagctaccaatgaaggcctcagtctgatgctcattgggcctgaggatgtgatcaactttaagaagatttacaaaacgctcaagaaagatgaggatatcccactgttccccgtgcagacaaaatacatggatgtggtcaaggagcgaatccgtttagctcgacagattgagaaatctgagtatcggaacttccaggcttgcctgcacaactcttggattgagcaggcagcagctgccctggagattgagctggaagaagacatgtataagggaggaaaagctgaccagcaagaagaacgtcggagacaaaagcagatgaaggttctgaagaaggagctgcgccacctgctgtcccagccactgtttacggagagccagaaaaccaagtatcccactcagtctggcaagccgcccctgcttgtgtctgccccaagtaagagcgagtctgctttgagctgtctctccaagcagaagaagaagaagacaaagaagccgaaggagccacagccggaacagccacagccaagtacaagtgcaaattaactggtcaagtgtgtcagtgactgcacattggtttctgttctctggctatttgcaaaacctctcccacccttgtgtttcactccaccaccaaccccaggtaaaaaagtctccctctcttccactcacacccatagcgggagagacctcatgcagatttgcattgttttggagtaagaattcaatgcagcagcttaatttttctgtattgcagtgtttataggcttcttgtgtgttaaacttgatttcataaattaaaaacaatggtcagaaaaaaaaaaaaaaaaaaaa

SEQ ID NO: 2400 - DNA, 1447 bp, Homo sapiens
tgtcactgagggttgactgactggagagctcaagtgcagcaaagagaagtgtcagagcatgagcgccaagtccagaaccatagggattattggagctcctttctcaaagggacagccacgaggaggggtggaagaaggccctacagtattgagaaaggctggtctgcttgagaaacttaaagaacaagagtgtgatgtgaaggattatggggacctgccctttgctgacatccctaatgacagtccctttcaaattgtgaagaatccaaggtctgtgggaaaagcaagcgagcagctggctggcaaggtggcagaagtcaagaagaacggaagaatcagcctggtgctgggcggagaccacagtttggcaattggaagcatctctggccatgccagggtccaccctgatcttggagtcatctgggtggatgctcacactgatatcaacactccactgacaaccacaagtggaaacttgcatggacaacctgtatctttcctcctgaaggaactaaaaggaaagattcccgatgtgccaggattctcctgggtgactccctgtatatctgccaaggatattgtgtatattggcttgagagacgtggaccctggggaacactacattttgaaaactctaggcattaaatacttttcaatgactgaagtggacagactaggaattggcaaggtgatggaagaaacactcagctatctactaggaagaaagaaaaggccaattcatctaagttttgatgttgacggactggacccatctttcacaccagctactggcacaccagtcgtgggaggtctgacatacagagaaggtctctacatcacagaagaaatctacaaaacagggctactctcaggattagatataatggaagtgaacccatccctggggaagacaccagaagaagtaactcgaacagtgaacacagcagttgcaataaccttggcttgtttcggacttgctcgggagggtaatcacaagcctattgactaccttaacccacctaagtaaatgtggaaacatccgatataaatctcatagttaatggcataattagaaagctaatcattttcttaagcatagagttatccttctaaagacttgttctttcagaaaaatgtttttccaattagtataaactctacaaattccctcttggtgtaaaattcaagatgtggaaattctaacttttttgaaatttaaaagcttatattttctaacttggcaaaagacttatccttagaaagagaagtgtacattgatttccaattaaaaatttgctggcattaaaaataagcacacttacataagcccccatacatagagtgggactcttggaatcaggagacaaagctaccacatgtggaaaggtactatgtgtccatgtcattcaaaaaatgtgattttttataataaactctttataacaag

SEQ ID NO: 2401 - DNA, 405 bp, Homo sapiens
agccattctccatatttcagatataagatttcagttctcagtgagtctaagtgacagaaggaatggagaccctcttgggcctgcttatcctttggctgcagctgcaatgggtgagcagcaaacaggaggtgacgcagattcctgcagctctgagtgtcccagaaggagaaaacttggttctcaactgcagtttcactgatagcgctatttacaacctccagtggtttaggcaggaccctgggaaaggtctcacatctctgttgcttattcagtcaagtcagagagagcaaacaagtggaagacttaatgcctcgctggataaatcatcaggacgtagtactttatacattgcagcttctcagcctggtgactcagccacctacctctgtgctgtgaggcacagtg

SEQ ID NO: 2402 - DNA, 1320 bp, Homo sapiens
tttgcctgggaggttaagaactacagggagaggcgagagagactatgactgccctacggctagagtagccgcgaagagaacacttccggggcggggctatctggccctttcctttccgcgtgtagaatgtggggcgcctgtaaagttaaggttcacgattccttggccaccatttccatcactctgagacggtacctgagattgggggcgaccatggcaaaaagcaagttcgagtacgtgagggacttcgaggctgacgacacctgcctggcacactgctgggtggtagtgcggctggacggccggaatttccatcggtttgctgagaagcacaactttgcaaaacccaatgacagccgtgctctccagctgatgaccaaatgtgcgcagactgtgatggaagaactagaggatattgtgatcgcgtatggacagagtgatgagtacagctttgtgttcaagcggaaaaccaattggtttaaaagaagagccagtaagttcatgactcacgtggcctcccagtttgcctccagctatgtgttttattggcgggattactttgaggaccagccccttctgtatcccccaggctttgacggaagagtcgtggtgtatcccagcaaccagactttaaaggactacctcagctggcgacaagcagattgtcacatcaataatctttataatacagttttctgggcacttatacaacaatctggactaacaccagtacaagcccaagggagattacagggaactcttgcagcagacaagaatgagattttgttttctgaattcaacatcaactataataatgagctgccgatgtataggaaagggactgtgttgatatggcagaaggtggatgaagtgatgacaaaagaaattaagctgccaacagaaatggaaggaaaaaagatggcagtgacccggaccaggacaaagccagtgcccttgcactgcgatatcatcggggatgctttctggaaggaacatccagagattctagatgaagacagctgacccttttgcgcttcagttctggtgtgcttaaccatgcaagccctcccacctcccagggctccttgccttaggtggctgtagcatccctaccacccaggacactggtgcgaatgacacaactcaagttgggaggggaacagggaaggaagggatggatgggggtggtgtatcttactctgtttaagcagaacaccttgtttgcggtgttggaacatggttcctttggcagaagtgctttttttttaatcgcagtactatttttataaagcaagaactattccaaaaaaaaaaaaaaaa

SEQ ID NO: 2403 - DNA, 6573 bp, Homo sapiens
gcgcccggcgcagctcggccagagcgaccgcggggctgagcgcgcgtccgcccagggggctccggaagctgccccggcccgcggcctcctccctcgctcccgcttcccctttctcgctcaccgccgccctccttccccagctccctcgccgtccgcccgccccacagccagcggctccgcgccccctgcagccacgatgcccgcggcccggccgcccgccgcgggactccgcgggatctcgctgttcctcgctctgctcctggggagcccggcggcagcgctggagcgagatgctcttcccgagggagatgctagccctttgggtccttacctcctgccctcaggagccccggagagaggcagtcctggcaaagagcaccctgaagagagagtggtaacagcgccccccagttcctcacagtcggcggaagtgctgggcgagctggtgctggatgggaccgcaccctctgcacatcacgacatcccagccctgtcaccgctgcttccagaggaggcccgccccaagcacgccttgccccccaagaagaaactgccttcgctcaagcaggtgaactctgccaggaagcagctgaggcccaaggccacctccgcagccactgtccaaagggcagggtcccagccagcgtcccagggcctagatctcctctcctcctccacggagaagcctggcccaccgggggacccggaccccatcgtggcctccgaggaggcatcagaagtgcccctttggctggaccgaaaggagagtgcggtccctacaacacccgcacccctgcaaatctcccccttcacttcgcagccctatgtggcccacacactcccccagaggccagaacccggggagcctgggcctgacatggcccaggaggccccccaggaggacaccagccccatggccctgatggacaaaggtgagaatgagctgactgggtcagcctcagaggagagccaggagaccactacctccaccattatcaccaccacggtcatcaccaccgagcaggcaccagctctctgcagtgtgagcttctccaatcctgaggggtacattgactccagcgactacccactgctgcccctcaacaactttctggagtgcacatacaacgtgacagtctacactggctatggggtggagctccaggtgaagagtgtgaacctgtccgatggggaactgctctccatccgcggggtggacggccctaccctgaccgtcctggccaaccagacactcctggtggaggggcaggtaatccgaagccccaccaacaccatctccgtctacttccggaccttccaggacgacggccttgggaccttccagcttcactaccaggccttcatgctgagctgcaactttccccgccggcctgactctggggatgtcacggtgatggacctgcactcaggtggggtggcccactttcactgccacctgggctatgagctccagggcgctaagatgctgacatgcatcaatgcctccaagccgcactggagcagccaggagcccatctgctcagctccttgtggaggggcagtgcacaatgccaccatcggccgcgtcctctccccaagttaccctgaaaacacaaatgggagccaattctgcatctggacgattgaagctccagagggccagaagctgcacctgcactttgagaggctgttgctgcatgacaaggacaggatgacggttcacagcgggcagaccaacaagtcagctcttctctacgactcccttcaaaccgagagtgtcccttttgagggcctgctgagcgaaggcaacaccatccgcatcgagttcacgtccgaccaggcccgggcggcctccaccttcaacatccgatttgaagcgtttgagaaaggccactgctatgagccctacatccagaatgggaacttcactacatccgacccgacctataacattgggactatagtggagttcacctgcgaccccggccactccctggagcagggcccggccatcatcgaatgcatcaatgtgcgggacccatactggaatgacacagagcccctgtgcagagccatgtgtggtggggagctctctgctgtggctggggtggtattgtccccaaactggcccgagccctacgtggaaggtgaagattgtatctggaagatccacgtgggagaagagaaacggatcttcttagatatccagttcctgaatctgagcaacagtgacatcttgaccatctacgatggcgacgaggtcatgccccacatcttggggcagtaccttgggaacagtggcccccagaaactgtactcctccacgccagacttaaccatccagttccattcggaccctgctggcctcatctttggaaagggccagggatttatcatgaactacatagaggtatcaaggaatgactcctgctcggatttacccgagatccagaatggctggaaaaccacttctcacacggagttggtgcggggagccagaatcacctaccagtgtgaccccggctatgacatcgtggggagtgacaccctcacctgccagtgggacctcagctggagcagcgaccccccattttgtgagaaaattatgtactgcaccgaccccggagaggtggatcactcgacccgcttaatttcggatcctgtgctgctggtggggaccaccatccaatacacctgcaaccccggttttgtgcttgaagggagttctcttctgacctgctacagccgtgaaacagggactcccatctggacgtctcgcctgccccactgcgtttcggaggagtccctggcatgtgacaacccagggctgcctgaaaatggataccaaatcctgtacaagcgactctacctgccaggagagtccctcaccttcatgtgctacgaaggctttgagctcatgggtgaagtgaccatccgctgcatcctgggacagccatcccactggaacgggcccctgcccgtgtgtaaagttaatcaagacagttttgaacatgctttagaagtagcagaagcggcagcagagacgtcgctggaaggggggaacatggccctggctatcttcatcccggtcctcatcatctccttactgctgggaggagcctacatttacatcacaagatgtcgctactattccaacctccgcctgcctctgatgtactcccacccctacagccagatcaccgtggaaaccgagtttgacaaccccatttacgagacaggggaaaccagagagtatgaggtttctatctaaagagagctacacttgagaaggggacttgtgaactcaaccacaatctcctcgagacattcatccagagaccatgtggcacttgattgaaaccccagaatgtcgactgtcttttgtttagactctttatcaaaggtttactgttttcttccctgtatttattatatttaaaagtgaaataggtgtgggtttggatgtttcgcggcctcagccaaattcatgttacagcctcaattctgaaggcaggtggaagacttgcaaaatggcaaaccgcggcagcaaaaacacaaaacagcagatggagtttctcccatcagcaatgccatgctaaggctgcattgaattgcatgcatctttgggaaccatgcccatgatgttttcagtacaaatctaagtcccaagattaggttggaaagggtatttcttgttggcttagtttgggttggaatttagcatgggtacttaaacccatttggagagctgtgctcctaaacaaattctgtgtcctctcttcccattttgccagcttctgaaaggtttttccacagcccctccctctcacggttcttctgaaggtagcaaaggtgttatataaacattgtcttttaccactctggcctcgctggacagtgacaaaacaagaaaacgttttctttctagaaaggtgataaacgaccaaaggcaatttttcagagacaaatgagagatttgagagttccaatgaagaattgggtgagggggatcattgggtaagggaattgggttaaaatgttcttttctttgacactctttcaatgatgaaagagcgtgtaatttatgctacaagtgccagaatcgatcaccatgttcagcaagccactctcaagctgtggtaataaacacacaggcttgggaggcaccagcggccccactcatacagtgacaaggatttgtgatgggaaaaaggaggtgccatgtttggaaatgcaggggtgagctctggtttctcctggggttctggaatatctcagccctcaaaatagaggagactcaagtgcactgattctctaaaaggtgtcatcttcagaatatacttgccatcaagtatttcagggggcgggagggtcccatgagaagaaactatttttctattctccaaagctgtctggatgttggagggtggtgtgaatgctgactgaggaggtgcagagaacaggggcaggggattttaaatcacagcagaccatccagtggaatcctgtatcatctgatctgaacatcaatgaagacagagagaggaatttcattcagaaaggattccatagccccacatctagtcacacgggcattcctcttattttatcagggtctgttttcccccaacccagtgaaaccggtgagtgtgtaactcttgggaagattcttttctaaatacaggtataaagagaaggtggagggtgcgggtgcatggaagaaatactatgtgtgaagcagattcaccttcctgggaccggtgacatggtggtgacagtcaatggcttggacagacagacgggcacagtggcatttggaaccctctttggtgccctcccattctctctggaattgtttcaagtctgctggttttcaaacaagaaaagacctttctggccatagggagaatagcagggagtctatgttttggtggttacattggaaacatcttaagcaagatagggaaagttgattttaggcacacatgtaccctccttgacagcaggaactcagacttcaatcttgggggtctaagaccagaatattttccttctgccagaaaagaatcttgcacatatactcctgaaggcatgagtgtgtggtccatggcaagaaatagctaaaggctgctttccaggacccaaagccccatttaatgcaagaaccagagaagtgttctaggccattagtggacaatgtcatgtttggagaaagataacaacacaaataatgtaacctttccttaaaaggcagaactcaatccattttatttgatgcttattctaaccctaaccctgggtcacctggaatgaagaactctatgaataatatttgattttacaacgtgttatggttatgtgaaaactaaacatttgccttttataaagactgacaaaatataaatctttattctaaccctatccccaaaactagccaggccacaccccagatgttcttattgactattggaaagatagaaaaggcgttgtgttttttgtttttttgttgttgttgtcattgttgtttttttcagaagaccagtgtctcagttctgtcttagtagtaccacacccgtaaccgtgttttaaaagtttgttttagcctagagacagatcatacgagttcaacaatgtacagtgtgattgaaaagacaggttggtgtctatttttctttttaaaatatctgaatgtgtatttgtaatacgtaaaggtaaaaaaaaatagtgccaaaaatgtgcaaggcatctcattacagctcatgtacgtctgtttttataagatcaatattaaaacccattgggattaaatatttttgaataggatacactcttgagaaactcgagaatggactgagccttcctacaagccactctttgtttttaaaacagtggggaaatacgtttacagagattgtgagcttcagagaatgcatgtgatggtgtgtattacatgctaattcatataagctgtatctgtcagctaccaccctgtgctttaaaaatgcacacactcaaccctctttagcttggagctcagctttttgcttttttttttttttttttgtagaattatttagctaacataagtattctgattgctacctgatggccattcttacttagtttcatagatgtgctttaactatgatcctttgaagctcaccccttggagagcctacagaacctcaggctgatagctttgaagactgccaaacagcccagaaggaagcaaagcatctgcataatcaggagggttgtataacaagtagtgatttggcaaatatgtgggtagctttaggctgaggcacgggcctcaggcaaaaatgcccttcgagtgaatccgaagggcatgatcttcctatgtccttgactaggcatgacgagtcatttgaggtcagatattatttgagttgttcagcacccccaaaggtaggcattctcctgggaaattttcatttccattttatcgccaaacaaaataaaaagcaaaacaaactttctaagctagaataatgaaattaagtcattttccactttgtatatattgatgctaataaaacagatgaaaaagac

SEQ ID NO: 2404 - DNA, 2690 bp, Homo sapiens
agatggcggtagctgaggggttgaccgagagacccagttgaaggcctttacgaagtgaaagaggccgggagtcgccccctacccgcttctcgtagtcctgggagcacagcagaagtgtttttctttttttaatgaacaagtaaaccatacaaattgtcaacatgggacggagatctacatcatccaccaagagtggaaaatttatgaaccccacagaccaagcccgaaaggaagcccggaagagagaattaaagaagaacaaaaaacagcgcatgatggttcgagctgcagttttaaagatgaaggatccaaaacagataatccgagacatggagaaattggatgaaatggagtttaacccagtgcaacagccacaattaaatgagaaagtactgaaagacaagcgtaaaaagctgcgtgaaacctttgaacgtattctacgactctatgaaaaagagaatccagatatttacaaagaattgagaaagctagaagtagaatatgaacagaagagggctcaacttagccaatattttgatgctgtcaagaatgctcagcatgtggaagtggagagtattcctttgccagatatgccacatgctccttccaacattttgatccaggacattccacttcctggtgcccagccaccctctatcctaaagaaaacctcagcctatggacctccaactcgggcagtttctatccttcctcttcttggacatggtgttccacgtttgccccctggcagaaaacctcctggccctccccctggtccacctcctcctcaagtcgtgcagatgtatggccgtaaagtgggttttgccctagatcttccccctcgtaggcgagatgaagacatgttatatagtcctgaacttgcccagcgaggtcatgatgatgatgtttctagcaccagtgaagatgatggctatcctgaggacatggatcaagataagcatgatgacagtactgatgacagtgacaccgacaaatcagatggagaaagtgacggggatgaatttgtgcaccgtgataatggtgagagagacaacaatgaagaaaagaagtcaggtctgagtgtacggtttgcagatatgcctggaaaatcaaggaagaaaaagaagaacatgaaggaactgactcctcttcaagccatgatgcttcgtatggcaggtcaagaaatccctgaggagggacgggaagtagaggaattttcagaggacgatgatgaagatgattctgatgactctgaagcagaaaagcaatcacaaaagcagcataaagaggaatcccattctgatggcacatccactgcttcttcacagcagcaggctccgccgcagtctgttcctccttctcagatacaagcacctcccatgccaggaccaccacctcttggaccaccacctgctccaccattacggcctcctgggccacctacaggccttcctcctggtccacctccaggagctcctccattcctgagaccacctggaatgccaggactccgagggcccttaccccgacttttacctccaggaccaccaccaggccgaccccctggccctcccccaggtccacctccaggtctgcctcctggtccccctcctcgtggacccccaccaaggctacctccccctgcacctccaggtattcctccacctcgtcctggcatgatgcgcccacctttggtgcctccccttggacctgccccccctgggctgttcccaccagctcccttgccaaaccctggggttttaagtgccccacccaacttgattcagcgacccaaggcggatgatacaagtgcagccaccattgagaagaaagccacagcaaccatcagtgccaagccacagatcactaatcccaaggcagagattactcgatttgtgcccactgcactgagagtacgtcgggagaataaaggggctactgctgctccccaaagaaagtcagaggatgattctgctgtgcctcttgccaaagcagcacccaaatctggtccttctgttcctgtctcagtacaaactaaggatgatgtctatgaggctttcatgaaagagatggaagggctactgtgacagcttttgatgccagaaaaggcttctgttcacaacagtggcccatggagaaagaggctcttattaaacttagatgaaagagctgcttccattgtcagggtattttctaatttcagttcaaggaatatcctaaaatttagccttgttcagaatttactgcacataaaaaagggtatttcatccagaatagatcagttattgaagcagtgctgctaacatccattccctttcataccaccattttcaccctgtttcttcccctcctccagttctttggaaatttgtgatcgggggatcttagttgcttatttgttttgactcttgtgtgctgtgggcactggagtagagatttctggagaaaaaaaaacagtttatttcatcttgccttttgtgtttgagttatttttaatattttcctgtaaatattttgtaatattttacttgtaatgaaatggatcacaatgtcatttcctaatacaaggcaggatatgtgggaagaatatgtacaattatttgattaaaattatttcccactgacctaaactttcagtgatttgtgggaaaaataaataaatgttctacaccaaaaaaaaaaaaaaaaaa

SEQ ID NO: 2405 - DNA, 2902 bp, Homo sapiens
cccagcttccgggttggtcgcgcgccttcctgcggctaagatggcgacggagcatcccgagcctcccaaagcagaattgcagctgccgccgccgccacctccaggccactatggcgcctgggctgcccaggagcttcaggccaagttggcagagatcggagctccgatccagggtaatcgcgaggagctggtggagcggctgcagagctacacccgccagactggcatcgtgctgaatcggccggttttgagaggggaagatggggacaaagccgctccacctcccatgtcggcacagctccctggaattcccatgccaccaccacctttgggactcccccctctgcagcctcctccgccacccccaccacctccaccaggccttggccttggctttcctatggcccacccaccaaatttggggcccccgcctcctctccgtgtgggtgagccagtggcactgtcagaggaggagcggctgaagttggctcagcagcaggcggcattgctgatgcagcaggaggagcgtgccaagcagcagggagatcattcgctgaaggaacatgagctcttggagcagcagaagcgggcagctgtgttactggagcaggaacgacagcaggagattgccaagatgggcaccccagtccctcggcccccacaagacatgggccagattggtgtgcgcactcctctgggtcctcgagtagctgctccagtgggcccagtgggccccactcctacagttttgcccatgggagcccctgttccccggcctcgtggtcccccaccgccccctggagatgagaacagagagatggatgacccctctgtgggccccaagatcccccaggctttggagaagatcctgcagctgaaggagagccgccaggaagagatgaattctcagcaggaggaagaggaaatggaaacagatgctcgctcgtccctgggccagtcagcgtcagagactgaggaggacacagtgtccgtatctaaaaaggagaaaaaccggaagcgtaggaaccgaaagaagaagaaaaagccccagcgggtgcgaggggtgtcctctgagagctctggggaccgggagaaagactcaacccggtcccgtggctctgattccccagcagctgatgttgagattgagtatgtgactgaagaacctgaaatttacgagcccaactttatcttctttaagaggatctttgaggcttttaagctcactgatgatgtgaagaaggagaaagagaaggagccagagaaacttgacaaactggagaactctgcagcccccaagaagaagggatttgaagaggagcacaaggacagtgatgatgacagcagtgatgacgagcaggaaaagaagccagaagcccccaagctgtccaagaagaagttgcgccgaatgaaccgcttcactgtggctgaactcaagcagctggtggctcggcccgatgtcgtggagatgcacgatgtgacagcgcaggaccctaagctcttggttcacctcaaggccactcggaactctgtgcctgtgccacgccactggtgttttaagcgcaaatacctgcagggcaaacggggcattgagaagccccccttcgagctgccagacttcatcaaacgcacaggcatccaggagatgcgagaggccctgcaggagaaggaagaacagaagaccatgaagtcaaaaatgcgagagaaagttcggcctaagatgggcaaaattgacatcgactaccagaaactgcatgatgccttcttcaagtggcagaccaagccaaagctgaccatccatggggacctgtactatgaggggaaggagttcgagacacgactgaaggagaagaagccaggagatctgtctgatgagctaaggatttccttggggatgccagtaggaccaaatgcccacaaggtccctcccccatggctgattgccatgcagcgatatggaccacccccatcgtatcccaacctgaaaatccctgggctgaactcgcccatccctgagagctgttcctttgggtaccatgctggtggctggggcaaacctccagtggatgagactgggaaaccgctctatggggacgtgtttggaaccaatgctgctgaatttcagaccaagactgaggaagaagagattgatcggaccccttggggggaactggaaccatctgatgaagaatcctcagaagaagaggaagaggaagaaagtgatgaagacaaaccagatgagacaggctttattacccctgcagacagtggccttatcactcctggaggcttttcatcagtgcctgctggaatggagacccctgaactcattgagctgaggaagaagaagattgaggaggcgatggacggaagtgagacacctcagctcttcactgtgttgccagagaagagaacagccactgttggaggggccatgatgggatcaacccacatttatgacatgtccacggttatgagccggaagggcccggctcctgagctgcaaggtgtggaagtggcgctggcgcctgaagagttggagctggatcctatggccatgacccagaagtatgaggagcatgtgcgggagcagcaggctcaagtagagaaggaggacttcagtgacatggtggctgagcacgctgccaaacagaagcaaaaaaaacggaaagctcagccccaggacagccgtgggggcagcaagaaatataaggagttcaagttttaggtcccctcacactagccctttttttggccctacgtctggatgcctgggcttcacacaagaaccacctctcccgcagttcccaaggacttgtcatttcatgttcttattttagacctgttttgtaaataaagctgtttcccaaggaaagagatgaatatttaacactaaaaaaaa

SEQ ID NO: 2406 - DNA, 4419 bp, Homo sapiens
atcctgctgggggggagggggcggagagagaagagagggagtgaacagccctgggctatcctgagctttacaaagtgttctgggtgagggcaaattacagaaccaagtggaaacgtccccgcaaccattataagtcctgggtttttaaggttcaggccgatccggcagctgcaagaggggctcctgggactccgagcaggccctaatccgcgcttggaccacacttcccagcagccttcacgccgcggacgggtcctttgctgggggaagggggattccttcgaagaggtggtcgtggagggcggggcagcagagcagactcagcaggcatgactggagagggaagtcccaatggtgctagaatggtgctgcagtggcagaagacggctcacaagtgaggtctggaagaacaacagggaagacatccatcatttgctccaaagtgtgcaagtcaaatcctggggagaatcatgataaccctgatcactgagcagctacagaagcagactctggatgagctgaaatgcacacgcttcagcatcagtctgcctttgcctgatcatgcagacatctccaactgtgggaactctttccagcttgtgtctgaaggtgcttcctggaggggcctgccccactgttcctgtgctgagttccaggacagcctcaacttcagctaccatccctcaggcctgagcctgcacctcagaccacccagtcggggaaactcccccaaggagcagcccttctcccaagtcctaagacctgagcccccagatccagagaagcttcctgtgccccctgcccctccatccaagaggcactgccgctcactctcagtgcccgtggacctgtctcgctggcagccggtgtggcggcccgccccctccaagctgtggactcccataaagcaccggggcagtggtggagggggtgggccgcaggtgcctcaccagagccccccaaagcgggtctccagcctcaggttcctccaagctcccagtgcctcttctcaatgtgccccagctcacagaccctacagccctcctttcttcagcctggccctggcccaagattcctctcgaccctgcgccgcctcccctcaaagtggctcctgggagagtgatgctgagtccttgtcaccttgcccacctcagcgccgcttctccctgtcacccagtctgggcccgcaggcaagccgcttcttgccctctgcccggagctctcccgcatcctccccagagctgccctggcgacctcgaggtctccgcaaccttccccgaagccgctcacagccttgtgatctggatgcccgcaaaactggggtcaagcggcgccacgaggaagacccccggcgtctgcggccttcgttggactttgacaagatgaatcagaaaccatactcaggaggtctttgtctccaagaaacagcccgggaaggcagcagcatctctccaccatggttcatggcctgtagccccccacccctctctgcttcctgcagccccactgggggttcctcccaggtgctgagtgaaagcgaagaggaggaggagggggctgtgcggtggggtcggcaggcgctgagcaagcggacactgtgccagcgggactttggggacctggacttgaatttgattgaggaaaactaaaactgagaggctacttcctggggccacacagactgactctctcatggctactaacaagtgtcgagtccccaaggctgggggccgagcctgggaatgggggtgagtggagggctccgactcagggcagctggaaatcttctcgctccagcaagctcgaccatgccaagagactggccgggacaagataaacggagctggtggcgggagggacagccccagagcagacccttcctatggcggccctgagtgtgagtatccctgccaccaagagagcaatgggcagggaaggaaggggtctgccgaccccagctcggggaatttcactagcccctttgcttcaaagggcacttgtgtcttagaatttggccagggtggggggttgagtcagcctcctcagagaaactgcgtgagagtgtgtgcgtgcatgggagtgtacttgtggaaaggtgtgtttgcgtagccttagggaaggaaggcaattgctccttaacagcagagtatcatgatacccccaggatcttgagttttttacaggatgttgggtttgctcaaggagtcaagaggagggcaccaagttttccttttttctaaatagctctggaaccaggcttgtaatccatagcatcaccgactctgcaaaggatttcattttggggtacagcagggtgttttaagtgctgtgacttcagctaatgatcttttcttcagccccaccccctccccactagctcgatctagtatattggggaatgcaggtggggggtgtcaccatattttttctgagctggcctttttttctcatcagattgtccaggctatattccacctgcctcttttgccctcttgagtagagttgcacacagcacatgggcaactgaagcagggttgaggggctctctctctctctcctctgctgatgggacccttttcccctcaccctctgcccttctaagtcatagactaggtaggaaggccctatattggtccccagcatctactgaggcagacctgcaacagaagtggcattcagtccccagcagacatgggtgagctcaccccagcactgctgttgggaaggtgactgcaggaaaccaattcttacaagatccaggcccagcctttttgacctgcttgagagggaagaaggggtgtttagcatttaatagtttgcttgtcttccactcctgccaggaagtgtttatttgcctctaattgggcctgagagaccatagggaggttggggctcactgagggattggctgaggatgtataaagcaaaggctgtgagaagcagttgggagtttggttgtcattggattgaatttacttttttgtttctcacccgcaacttgagccaggacagctggtccaagtggccacagtgatgggtttaagtaccttggtagggctggcaccagtggaaacacatactgaagctgccaccacaatagcttgtgaggttttatccagctgtggttagaccctgcatgaccaaatttgacctgcccttgtttatggcaagaagggcatttttctcttcaatttccagggtttcctaggacccagttcctcatgtaagggaggaagaccaaggtctttgtgttttcttcctcatggaattgaacctgacattttctggatctcctgcatgtcaggagcatcagtgaggcttcagcctcctcgtctccactccagagaggaggtggctatgtcttcttaagcctctggccctcagaggctcctccctatctcctggctagttaccactaggctaccaggtctctaggggcctgagagaggccctctagagaatccagggaaactgtgagcccaggagttgcccatctatggtttcattcctcccctggctcttctccctcttcaggccataatttccctggtgccaatttcttttcctcctggggcatcctcatcccagggctctctgctgtagattggctgtgccagcttccaacaggttactggcaatgccagtgagtttctgtaggccctaagctgaagaagtgaggcagtgattctgcctccatcctggtttccccaaagccccagggcaccatccttaggggagaaggtctacagttatcattattttaattccattactttcagtctggaaaactaagctagtcagaactgtcatcttgcttcccaatctaagaacctgtggccctggaacacttttcaagaattggttcattttgctttacacagtagatctgttccaacagttctgtgtaaaccaaatgctatttttcaatgcatttggactgctgaccatttaaaagcagcctatgattgcttctttttgtaaagcaagcaacctccctccactttagctgttttgactatttgaattttcacatattgggcttacccagagtggagcacacctccagggcatgtggctgacactgggtcaatgtctgcatctgtgctgtgtgtgtagtgtggttggccagtaggtgagtatccctgtgtgtgtgagtgaagccactccccaggctggtgctctcctcctgtgcccagtgactgcccagtggcagctcagctgcccttcactcccacctgctgccaaagtccctgtgctaatgggattacaaatacaaaaagtggaaaaaaattttcgtaaactttgttttatattaaaagaaaaatccataagtctgtgtgtgttaaacatgaggttctgcctctgtggctgtgtttgaaaaaataaagttttattagaataatccattttcccaagcaa

SEQ ID NO: 2407 - DNA, 4473 bp, Homo sapiens
gaccgtgaggctgtgagtcgcgcggacggagccggacaaaagcgggcggcggcggcaggatgaacagcatcaagaacgtgccggcgcgggtgctgagccgcaggccgggccacagcctggaggccgagcgcgagcagttcgacaagacccaggccatcagcatcagcaaagccatcaacacccaggaggcccccgtgaaggagaagcacgcccggcgcatcattctgggcacacaccacgagaagggggctttcaccttctggtcctatgccattgggctgccgctgcccagcagctccattctcagctggaagttctgccacgtcctccacaaggtccttcgagacgggcaccccaatgtgctgcatgactgccagcggtaccgcagcaacatccgggagattggagacctgtggggacatttgcatgaccgctacggacagctggtgaatgtctacaccaagctgctgctgaccaagatctccttccacctcaagcatccccagtttcccgcgggcctggaggtgacagatgaggtactggagaaggcagctgggaccgatgtcaacaacatcttccagctcactgtggagatgtttgattacatggattgtgagctgaagctttctgaatcagttttccgacagctcaacacggccatcgccgtatcccagatgtcctcaggccagtgccgcctggcccccctcatccaggtcatccaggactgcagccacctctaccactacacggtcaagctcctgttcaagctacactcttgtctccctgcggacaccctgcaaggccacagggaccggttccacgagcagtttcacagcctcaggaacttcttccgcagagcctccgacatgctgtacttcaagcggctcatccagatcccccggctgcccgagggaccccctaacttcctgcgggcctcagccctggctgagcacatcaagccggtggtggtgatccccgaggaggccccggaagatgaggagccggagaatctcattgagatcagcacagggccccccgcgggggagccagtggtggtggctgacctcttcgatcagacgtttggaccccccaatgggtctgtgaaggacgacagggacctccagattgagagcttgaagagagaggtggaaatgctccgctctgaactggagaagatcaagctggaggcccagcggtacatcgcgcagctgaagagccaggtgaatgcactggagggtgagctggaggagcagcggaagcagaagcagaaggccctggtggataatgagcagctccgccacgagctggcccagctgagggctgcccagctggagggcgagcggagccagggcctgcgtgaggaggctgagaggaaggccagtgccacggaggcgcgctacaacaagctgaaggaaaagcacagtgagctcgtccatgtgcacgcggagctgctcagaaagaacgcggacacagccaagcagctgacggtgacgcagcaaagccaggaggaggtggcgcgggtgaaggagcagctggccttccaggtggagcaggtgaagcgggagtcggagttgaagctagaggagaagagcgaccagctggagaagctcaagagggagctggaggccaaggccggagagctggcccgcgcgcaggaggccctgagccacacagagcagagcaagtcggagctgagctcacggctggacacgctgagtgcggagaaggatgctctgagtggagctgtgcggcagcgggaggcagacctgctggcggcgcagagcctggtgcgcgagacagaggcggcgctgagccgggagcagcagcgcagctcccaggagcagggcgagttgcagggccggctggcagagagggagtctcaggagcaggggctgcggcagaggctgctggacgagcagttcgcagtgttgcggggcgctgctgccgaggccgcgggcatcctgcaggatgccgtgagcaagctggacgaccccctgcacctgcgctgtaccagctccccagactacctggtgagcagggcccaggaggccttggatgccgtgagcaccctggaggagggccacgcccagtacctgacctccttggcagacgcctccgccctggtggcagctctgacccgcttctcccacctggctgcggataccatcatcaatggcggtgccacctcgcacctggctcccaccgaccctgccgaccgcctcatagacacctgcagggagtgcggggcccgggctctggagctcatggggcagctgcaggaccagcaggctctgcggcacatgcaggccagcctggtgcggacacccctgcagggcatccttcagctgggccaggaactgaaacccaagagcctagatgtgcggcaggaggagctgggggccgtggtcgacaaggagatggcggccacatccgcagccattgaagatgctgtgcggaggattgaggacatgatgaaccaggcacgccacgccagctcgggggtgaagctggaggtgaacgagaggatcctcaactcctgcacagacctgatgaaggctatccggctcctggtgacgacatccactagcctgcagaaggagatcgtggagagcggcaggggggcagccacgcagcaggaattttacgccaagaactcgcgctggaccgaaggcctcatctcggcctccaaggctgtgggctggggagccacacagctggtggaggcagctgacaaggtggtgcttcacacgggcaagtatgaggagctcatcgtctgctcccacgagatcgcagccagcacggcccagctggtggcggcctccaaggtgaaggccaacaagcacagcccccacctgagccgcctgcaggaatgttctcgcacagtcaatgagagggctgccaatgtggtggcctccaccaagtcaggccaggagcagattgaggacagagacaccatggatttctccggcctgtccctcatcaagctgaagaagcaggagatggagacgcaggtgcgtgtcctggagctggagaagacgctggaggctgaacgcatgcggctgggggagttgcggaagcaacactacgtgctggctggggcatcaggcagccctggagaggaggtggccatccggcccagcactgccccccgaagtgtaaccaccaagaaaccacccctggcccagaagcccagcgtggcccccagacaggaccaccagcttgacaaaaaggatggcatctacccagctcaactcgtgaactactaggccccccaggggtccagcagggtggctggtgacaggcctgggcctctgcaactgccctgacaggaccgagaggccttgcccctccacctggtgcccaagcctcccgccccaccgtctggatcaatgtcctcaaggcccctggcccttactgagcctgcagggtcctgggccatgtgggtggtgcttctggatgtgagtctcttatttatctgcagaaggaactttggggtgcagccaggacccggtaggcctgagcctcaactcttcagaaaatagtgtttttaatattcctcttcagaaaatagtgtttttaatattccgagctagagctcttcttcctacgtttgtagtcagcacactgggaaaccgggccagcgtggggctccctgccttctggactcctgaaggtcgtggatggatggaaggcacacagcccgtgccggctgatgggacgagggtcaggcatcctgtctgtggccttctggggcaccgattctaccaggccctccagctgcgtggtctccgcagaccaggctctgtgtgggctagaggaatgtcgcccattactcctcaggcctggccctcgggcctccgtgatgggagccccccaggaggggtcagatgctggaaggggccgctttctggggagtgaggtgagacatagcggcccgggcgctgccttcactcctggagtgagtttccatttccagctggaatctgcagccacccccatttcctgttttccattcccccgttctggccgcgccccactgcccacctgaaggggtggtttccagccctccggagagtgggcttggccctaggccctccagctcagccagaaaaagcccagaaacccaggtgctggaccagggccctcagggaggggaccctgcggctagagtgggctaggccctggctttgcccgtcagatttgaacgaatgtgtgtcccttgagcccaaggagagcggcaggaggggtgggaccaggctgggaggacagagccagcagctgccatgccctcctgctccccccaccccagccctagccctttagcctttcaccctgtgctctggaaaggctaccaaatactggccaaggtcaggaggagcaaaaatgagccagcaccagcgccttggctttgtgttagcatttcctcctgaagtgttctgttggcaataaaatgcactttgactgtttgttgtc

SEQ ID NO: 2408 - DNA, 1835 bp, Homo sapiens; identical to SEQ ID NO: 2029

SEQ ID NO: 2409 - DNA, 6133 bp, Homo sapiens; identical to SEQ ID NO: 2374

SEQ ID NO: 2410 - DNA, 3384 bp, Homo sapiens
cagcgcgcgctcctgcagccccggcggagtcccggcggggagcgcccgcgtaggcaggcacccggggcagccctccgtcctcgccgcgcggcctgagaacccctgggccctgggcgagggggctgggctgtgcagcccccgaggctaactgggcgggatcgcagctgcaggggttgtgcgagcagccacggcggcacctgtgccctgcgggcacccaccctgcccctgccgaggcaggcgcccaccgccggcggtgatgcggctgtgaagccctagtcgattaacgtgacagtgtcaggtggacccacagccatcccacctccccctctggggagtgctgagagtgaggcagcatggaggagaggaagcatgagaccatgaacccagctcatgtcctctttgaccggtttgtccaggccaccacctgcaagggaaccctcaaggctttccaggagctctgtgaccacctggaactaaagccaaaggactaccgctccttctatcacaagctcaagtccaagcttaactactggaaagccaaagccctctgggcaaaattggacaaacggggcagtcacaaagactacaaaaagggaaaagcgtgcactaacaccaagtgtctcatcattggggctggcccctgtggtctccgtacagccatcgacttatccttactgggggccaaggtggttgttattgagaaacgagatgccttctcccgcaacaacgtcttgcatctctggccattcaccatacatgatctacgaggtctgggtgccaagaagttctatggcaagttctgtgctggagccatcgaccatatcagtatccgtcagctccaactaatacttttgaaagtagccttgatcctaggcattgaaatccacgtcaatgtggaattccaaggacttatacagcctcctgaggaccaagagaatgaacggataggctggcgggcactggtgcaccccaagactcatcctgtgtcagagtatgaatttgaagtgatcatcggtggggatggtcggaggaacaccttggaagggtttcgtcggaaagaattccgtggcaaactggccatcgccatcacggcaaattttatcaaccgaaatacaacagcagaagctaaagtggaagagatcagtggtgtggcttttatattcaaccaaaaatttttccaggaactgagggaagccacaggtattgacttggagaacatcgtttactacaaagatgacacacactatttcgttatgacagccaaaaagcagagtttgctggacaaaggagtgatactacatgactacgccgacacagagctcctgctttcccgagaaaacgtggaccaggaggctctgctcagctatgccagggaggcggcagacttctctacccagcagcagctgccgtctctggattttgccatcaatcactatgggcagcccgatgtggccatgtttgacttcacttgtatgtatgcctccgagaacgccgccttggtgcgggagcagaacggacaccagttactagtggctctggtcggggacagcctcctagagcctttctggccaatgggaacaggaatagcccggggctttctagctgctatggactctgcctggatggtccgaagttggtctctaggaacgagccctttggaagtgctggcagagagggaaagtatttacaggttgctgcctcagaccacccctgagaatgtgagtaagaacttcagccagtacagtatcgaccctgtcactcggtatcccaatatcaacgtcaacttcctccggccaagccaggtgcgccatttatatgatactggcgaaacaaaagatattcacctggaaatggagagcctggtgaattcccgaaccacccccaaattgactcgcaatgagtctgtagctcgttcaagcaaactgctgggttggtgccagaggcagacagatggctatgcaggggtaaacgtgacagatctcaccatgtcctggaaaagtggcttggccctttgtgcaattatccatagataccgccctgacctgatagattttgattctttggatgagcaaaatgtggagaagaataaccaactggcctttgacattgctgagaaggaattgggcatttctcccatcatgacaggcaaagaaatggcctccgtgggggagcctgataagctgtccatggtgatgtacctgactcagttctacgagatgtttaaggactccctcccctctagcgacaccttggacctaaatgccgaggagaaagcagtcctgatagccagcaccagatcccctatctccttcctaagcaaacttggccagaccatctctcggaagcgttctcccaaggataaaaaggaaaaggacttggatggtgctgggaagaggagaaagaccagtcaatcagaggaggaggaagctcctcggggccacagaggagaaagaccgaccctggtgagcactctgacagacaggaggatggacgttgccgttgggaaccagaacaaagtgaagtacatggcgacccagctgctggccaaatttgaagagaatgcgcccgcacagtccatcggcatacggagacagggctccatgaagaaggagttcccgcagaacctgggaggcagcgacacatgctacttctgccagaagcgggtctacgtgatggagaggctgagtgccgagggcaagttcttccaccggagctgcttcaagtgcgagtactgcgccaccaccctgcgcctctcggcctacgcctacgacatcgaggatggtaaattctactgtaagccacactactgctatcgactctctggctacgcacaaaggaagagaccggcagtggctcccctgtctggaaaggaggccaaaggacccctgcaggatggcgccaccacagatgcaaacggacgggccaacgccgtggccagctccactgagagaaccccaggttcaggcgtgaacggcctggaggagcccagcatcgccaagcgactgaggggcaccccagagcggatcgagctggagaactaccgcctgtccctgaggcaggctgaggcactgcaggaggtaccggaggagactcaggccgagcacaacctgagcagcgtgctggacacgggcgccgaggaggacgtcgccagcagagactgggtctccccatggttgcccaggatggtctcaaactcctgggctcaaatgatccacccacctcagcctcccacagtgctgggatcacagatgtgagctactgggcccagctgagcataagagtcttttctgtgtcacctttgtgttccctacagtgtctagcaagtgcgttgtgaggggaagataattgaataaattttatccaggtaaaaaaaaaaaaaaaaaa

SEQ ID NO: 2411 - DNA, 3220 bp, Homo sapiens; identical to SEQ ID NO: 908

SEQ ID NO: 2412 - DNA, 2935 bp, Homo sapiens
ggagctggcgctgggaggggaggagcgcgcagcccgcgcgccgcagggccgggcggaaagtttttcctgacggagttttggctgcggcagcggcggcggcggccggagcgggccatggacgcgctcaagtcggcggggcgggcgctgatccggagccccagcttggccaagcagagctgggggggcggtggccggcaccgcaagctgcctgagaactggacagacacgcgggagacgctgctggaggggatgctgttcagcctcaagtacctgggcatgacgctagtggagcagcccaagggtgaggagctgtcggccgccgccatcaagaggatcgtggctacagctaaggccagtgggaagaagctgcagaaggtgactctgaaggtgtcgccacggggaattatcctgacagacaacctcaccaaccagctcattgagaacgtgtccatatacaggatctcctattgcacagcagacaagatgcacgacaaggtgtttgcatacatcgcccagagccagcacaaccagagcctcgagtgccacgccttcctctgcaccaagcggaagatggcacaggctgttaccctcaccgtagcccaggccttcaaagtcgcctttgagttttggcaggtgtccaaggaagagaaagagaagagggacaaagccagccaagagggaggggacgtcctgggggcccgccaagactgcaccccctccttgaagagcttggtcgccactgggaacctgctggacttagaggagacagctaaggccccgctgtccacggtcagcgccaacaccaccaacatggacgaggtgccgcggccacaagccttgagtggcagcagtgttgtctgggagctggatgatggcctggatgaagcgttttcgaggcttgcccagtctcggacaaaccctcaggtcctggacactggcctgacagcccaggacatgcattacgcccagtgcctctcgcctgtcgactgggacaagcctgacagcagcggcacagagcaggatgacctcttcagcttctgagggcccggggccagccggacacaagcggccctgacacgtgatggaccaaagccacctgctgcgggggagccagttctggggcccgcctgccacctctcccagccctcagcattgtcagcctgaagatcagagctgcagccagtcaggcaggggagagatttttcttttaagccctgctctttctctgagaaccaaaagatgccttgaatatttattcagtgacttctggcttatgctcagaagccagtctgcgtcaggcacgtctcctgctgcgtgacatgtgcagtgctgtaatcggctcccgcttgctctcctggagcaagctctgccctggctgtgggtatcaggactgtgaccaaagcatttctagtcccttctctctttctaaggacccaaatttccctgggggcatcctgcttcctgaaagctgttggatttcagtgatttttccccccaccccccagcacaggagagcacccacagccgcagaaggggaatgtgtcctcctgctctgcttcctcagggcccagcaggcgggggtttgagccctggaccccaggctcttagagactaaggggcagctcctgaccaaagacgatacagcttggcactttaaagcattaacagcaggtgtgaccctgagggctcctccatggtgctgcattgagtccagctttccttctgcccttcctccaggagaaggggcccaaggtccccgtggatggtctccacctgtgcttggaaccagtgtaactggctgctccctgctcccagggactgacacggggatcatctctgtgaccgccctccgtcgggcccctgcctgccttctcccctccacgcaaggctgtgctcttcctctggtttctgtgtgtccgtttgagtgtctgcgccccgcctccccatacttcctgggatgatgtgtgaaacctgacacctagatttatttggaaatattctatgaccactttacagatgaggaaacaggcctcaagcgtggaggggtagagtgaagagtagaacccaggtctgatgccaaagctgctttcttctctgcctcctcctcacgcaactcacacctccttttcttctagctttgttgtcctcccaggaaccaaaaaaccccagctattttctgaccaaaatgtgtttcataacaaaccatctggtgcctttccacacagaactggcaggagcctcgtgtcctgctagctgtctctcttgttgatttccgtgaaaatgcaagtgtttgaagtctgctcattccgagggtgaaacaaaatccaaccctgtcagaatcatgctgttctctttgctgacactgtgaccctgggtcgggacagaccagcagcaatctgtctttagaatcgctttccttcctccccttttgcccccgtggggctcccggcatcctgaaagccagcaaagcctccagcatcttttccatcctgaggtgcctcccagtggcctggcttgtcggagcaagtttcatcagccctagggaaaacacggccctcctgggaacctccttacctggagtaaccggacaccttagacggaggtgcctgagggtggggtgggatttgcagggtcattatcagaacatgaggataacttccttgcccctgctctgtagccacctccttggcaccggcctctatttgtcataaggcggcgtgggcgaggcctgacacaggccagccttggcacgaggggggccaggggttctgagaagcgctgccctgtgagagccacgctggccttcgtctccatctctggttgacgggctgtccgtgtgcctcctgtgtgtctgcagacaagtcttgctgtgctttatttgtgaaactttaatgaggaaaaaacaaataataaatgttctcgttttgaaactcaa

SEQ ID NO: 2413 - DNA, 2051 bp, Homo sapiens; identical to SEQ ID NO: 2134

SEQ ID NO: 2414 - DNA, 429 bp, Homo sapiens; identical to SEQ ID NO: 2109

SEQ ID NO: 2415 - DNA, 1850 bp, Homo sapiens
agaaagcccaattccatctggcccctgcaggttggctcagcactggggaatcagagtcccctccatgaccaaggcaccactccactgacagactctgttaatcagcttgcttggctggcctccaaccataggtccaggggctgagacaaggtccttttgagctcctatgtgggaggctctggaaagcttagcaacactttccaacaactttgccagggtcacatctcccaggaagatctcacttccccacagaagctcttggcctggcctcctgcagtgccacgctccgtgtatttgacaagctgagttggacactccatgtggtagagtgtcagtttgtcaaataccccaagtgcggcacatgcttaccagctctaggccagggcagatgggatatgacgaatggactgccagctggatacaaggatgctcaccaagcaccaagttctcacaagttattttatgtgactttgcaggaactgaggcattatatctgaggacaccaggggaaaagtgtggcatctcagggaaatacagccctgggctgtgtctacacacaccatgagagtgctgatgggggcgcaatagtcttgaaaatgtataaagtgtccaggaatggaagtgctctttgattcattattattttcttccttcatattcccctcccagagtctcctatctaggacatcagcattctcacacaagcctaatggcttatctgagtaagcagggcttagaaattcactttcttgatactcagtcttgccttctaaacactccttgatcttgcctacctctccccttttccacatgtcttttcctgtaggaacactttctccatttattcctgcctatccaattcttccctatatttcctggaccagctaaagtccagtgtttccagagacttttgaaagtcaacttacactttttccttcttcattcacaaagctcttcttccctgggccctggtatgtatgcctttctctcctactgtctaatagcacctcgtaaattgtcaatgaacttttctaaggggtattcttgaattcccaactagattgtgagcttctggaagacaaggctatgtctttgattgttgtctcccctaccacagcccagtactttagttacagaaaataataaatatttactgattgattgactttcctcttgtccactagctttaggtttgggggccaaattctaccctggattttgaaaaattcaaactgtgaacaccacaatgttatagagcatatgaggtagtagccagcatgaaggatgttttcttcctgagaaacagtgtcaagggctggaggaagagggcaaaatagcagactcagagggcaaataaattttggtattacttggtcacacaaggttatacaggtgttttcttgtaggatttttcagagcctttaatagtctaatgttgcattgagaatctcaaagaggaaaccatagaatgaggcatttgccatacctatctgatcatgaattttcttttcccccacagccttctcctgtgtcaatgtccaatgaagcacgatttgggaaactgtcctagagaaactttataccttcccgctcttctggagatcttttcctcttttcattcatctactttccccaaccagccatctgcctaagaaaggtcacatgttatcatctcatttttgtttagcctctgcagctgtggactatctttattacataggaattctttactagcttgtcctgtatttaaaaatattctaagttttgaggcaaagaagatccagatgctgcaataaatatatgcactgaggagttaaaaaaaaaaaaaaaaaaaaaaaaaaaaaaaaaaa

SEQ ID NO: 2416 - DNA, 316 bp, Homo sapiens
cctcttctcttctcgcttgggaacgccggtctcacctcggcttgcaatggaccccaactgctcctgcgccgctggaggctcctacgcctgcgccggctcctgcaagtgcaaaaagtgcaaatgcacctcctgcaagaagagctgctgctcctgttgccccctgggctgtgccaagtgtgcccagggctgcatccgcaaaggggcttcggaaaagtgcagctgctgtgcctgatgtcgggactgccctgctctcggatgaaaacagaatgacacgtaaagtccgggatttttttttctacaactccgactcatttgc

SEQ ID NO: 2417 - DNA, 2389 bp, Homo sapiens
agcgacgcggtgacgccacaaaaatggcggacgctggaaagcgccgttcctgactctaatgtacttagacacttgaagccacaaaaggatttatccccgaggttcctcatctgctcgcgaggatgccttttctcttctgccttgcgaaataacagcagcctagctgttgcccgtgaccagtgagaaaggcagcgtcgcgggctgattaggtttcacccaaagggtgccggcgccgaattggtttctaacgagaacttttaaaatgatccgttccaaaaaagggtaggagccgcgagaccctccaactgcccagagaaaacaagtctcgtctggcaaagttctcggcccacgcggtccgcggccaagggccaacggtccctcgccccacgttgccgcagcactgcgcgtgcgcgagccgctgtcaaacgcgctgacggaggccgagaagaaaaaaaggcgggagccgtcaatcccgggttgagcaaaatggcgcgggagaaggagatgcaggagttcacccgtagcttcttccgaggccgcccggacctcagcacgcttacgcattccatcgtgcggcggaggtacttagctcactcgggccgcagccacctggagcccgaggagaagcaggcactgaagcggctggtggaggaggagctgctgaagatgcaggtggatgaagccgcttccagggaagacaaactggaccttaccaagaagggcaagaggcctcccaccccttgtagcgacccggagagaaaaaggttccgcttcaattcagagtcggagtccggctctgaagcctccagcccagactactttggacccccagcaaagaatggggtggcagcagaagtcagcccagccaaagaggagaatccaaggcgagcctcaaaggcagttgaggagagcagtgatgaggaacggcagagggacctgcccgcacagaggggagaggagagcagtgaggaggaggaaaaggggtacaaggggaagactaggaagaaacctgtggtaaagaagcaggcaccaggcaaggcctcagtcagtaggaagcaggccagggaagaaagtgaggagagcgaggcagaacccgttcagaggacagcaaagaaggtggagggaaataaaggaactaaaagcctgaaggaaagtgaacaggagagtgaagaggagatcctagcccagaagaaagagcagagagaggaggaagtggaggaggaagagaaagaagaggatgaggaaaagggggattggaaacccagaaccaggagcaatggccggagaaagtcagctagggaggagaggagctgtaagcagaaaagccaggcaaagaggctcttgggagactcagacagcgaggaagagcagaaagaggcagccagcagtggggatgacagtgggagagatagagaacccccagtgcagaggaagagtgaggacaggacccagcttaagggtgggaagaggttgagtggaagcagcgaggacgaggaagacagtgggaagggggaacccacagctaaaggctctagaaagatggccagactgggcagcaccagtggtgaggaaagtgacttggagagggaggtaagtgacagcgaggcagggggaggcccccagggggagaggaagaaccgctcttccaagaagagctccaggaaaggcaggacacgaagctcctcttcctcctcagatggaagtccagaggccaaaggagggaaggctggctcaggtcgccgtggagaggaccacccggctgtgatgaggctgaagcgctacattcgggcctgtggtgcccatcgaaactacaagaagctgttgggctcctgttgctcacacaaggagcgcctgagtatcctccgggcagaactggaagcgctaggcatgaagggtaccccttccctagggaagtgtcgggccctgaaggagcagagggaggaggcagctgaggtggcctccttggatgttgcgaacatcatcagtggctcgggccggccacgcagacgtacagcctggaaccctttaggagaagcagcacccccaggggagctgtaccgacggaccctggactcagatgaagagcggccccgtcccgcacccccagactggtcacatatgcgtggcatcatcagcagtgatggcgagagtaactgagctctgccacccccaggagggacccttgatacatgtacaaagcatacatagcaccccttgccctgtgtctgtggaacagaagcagcttccttcagagaagactgcagctcccaaggacacaagctgttgggatgctacttctcagcttcacgctgtccctttaaggtgtttattttttaagactcaataaaggagtgtttttaatcacctcatcaaaaaaaaaaaaaaaaaa

SEQ ID NO: 2418 - DNA, 7253 bp, Homo sapiens
ggaaagaagtggaataattaggaacctagggtggggtagggtagcaggacatttcaaacattaatgagcatatgagattccaggtcttgttaaaatgcaaattctgattcagctggtaggtgaggtctgagattgtgcatttctaacaagcactcagataatcttaaggctgttggccccagggtcacacttatagtgattttctagaacccagttggggaagtgaatcttgggcaggagaaatacacacctcttgcattgagtttggagatctcatctgatataactttttaagaaagaaaaataattttccaaatatccaattgataagctttcccactaagtggctttcccactaagtggctgcgttatgaaaattgcttcactttgaaacttctggtcttggtaatatagaatttctgtgttctcacagtgcttgattgagaatatgatattgagattatggcataaaatatagtggctgtacaaaaaaaaatacattattaggatctctaacaattatgtaaaagtcattgcttcatgggtagagctcaaactttggtgtgagacctggttttattcttggcacttactctgagttgtcttaggcaaattaataccttaagcaaaaatattctcatgtacattttacatgagaattataaatgaagtacataaagtccagcagtcacaaatgttatctattattaccatcgtcctaagactgcaatcagctatagtgaaagtagtctcaaagattgtttcataaatcatcagattcacctaattttctaaagaatttaaataaggagatggaatgaatagattgcattttgtttccatgcacaggggaactgtgcatatttcttctgtgactcggaaatggtttaacttttaaaaatcccaaaatagctgaagttagcagacatgcaatttaccaaggatgattggaatttttatctttcctgtaataatactatacccaagcacactgctcatgaggaaaacatttttatgtgaatcttttactcttgggggcaaagaatgctgtttttctttttgataactatgtttatagaatctaaatcaccctgagcaattatttcaacatctaaagttattattaccattcatgtttcatttatagctatttgaattttgatgaatttcaatatggtgctacagtgatagggcaagtgcaaataagttcaatatatgggtacggtctaaagctattttaatttttttattacaactgctatgaagaaaattaggatatgccatattttcacgttttacagttggatgtcctatgatgttctcttccagagaacagagctcggagctctggaaatttggaggcaactgatatgtgctcatgtctgcatctgtgtgggttggctgtatctcagggacagagtctgcagcaaaaaagatataattttgaggactgaacaaaattcaggaaggactattctcattaaggcagtaacagagaagaattttgaaacaaaagattttcgagcctctctagaaaatggtgttctgctgtgtgatttgattaataagcttaaacctggcgtcattaagaagatcaatagactgtctacaccaatagcaggattggataatataaacgttttcttgaaagcttgtgaacagattggattgaaagaagcccagcttttccatcctggagatctacaggatttatcaaatcgagtcactgtcaagcaagaagagactgacaggagagtgaaaaatgttttgataacattgtactggctgggaagaaaagcacaaagcaacccgtactataatggtccccatcttaatttgaaagcgtttgagaatcttttaggacaagcactgacgaaggcactcgaagactccagcttcctgaaaagaagtggcagggacagtggctacggtgacatctggtgtcctgaacgtggagaatttcttgctcctccaaggcaccataagagagaagattcctttgaaagcttggactctttgggctcgaggtcattgacaagctgctcctctgatatcacgttgagaggggggcgtgaaggttttgaaagtgacacagattcggaatttacatttaagatgcaggattataataaagatgatatgtcgtatcgaaggatttcggctgttgagccaaagactgcgttacccttcaatcgttttttacccaacaaaagtagacagccatcctatgtaccagcacctctgagaaagaaaaagccagacaaacatgaggataacagaagaagttgggcaagcccggtttatacagaagcagatggaacattttcaagactctttcaaaagatttatggtgagaatgggagtaagtccatgagtgatgtcagcgcagaagatgttcaaaacttgcgtcagctgcgttacgaggagatgcagaaaataaaatcacaattaaaagaacaagatcagaaatggcaggatgaccttgcaaaatggaaagatcgtcgaaaaagttacacttcagatctgcagaagaaaaaagaagagagagaagaaattgaaaagcaggcacttgagaagtctaagagaagctctaagacgtttaaggaaatgctgcaggacagggaatcccaaaatcaaaagtctacagttccgtcaagaaggagaatgtattcttttgatgatgtgctggaggaaggaaagcgaccccctacaatgactgtgtcagaagcaagttaccagagtgagagagtagaagagaagggagcaacttatccttcagaaattcccaaagaagattctaccacttttgcaaaaagagaggaccgtgtaacaactgaaattcagcttccttctcaaagtcctgtggaagaacaaagcccagcctctttgtcttctctgcgttcacggagcacacaaatggaatcaactcgtgtttcagcttctctccccagaagttaccggaaaactgatacagtcaggttaacatctgtggtcacaccaagaccctttggctctcagacaaggggaatctcatcactccccagatcttacacgatggatgatgcttggaagtataatggagatgttgaagacattaagagaactccaaacaatgtggtcagcacccctgcaccaagcccggacgcaagccaactggcttcaagcttatctagccagaaagaggtagcagcaacagaagaagatgtgacaaggctgccctctcctacatcccccttctcatctctttcccaagaccaggctgccacttctaaagccacattgtcttccacatctggtcttgatttaatgtctgaatctggagaaggggaaatctccccacaaagagaagtctcaagatcccaggatcagttcagtgatatgagaatcagcataaaccagacgcctgggaagagtcttgactttgggtttacaataaaatgggatattcctgggatcttcgtagcatcagttgaagcaggtagcccagcagaattttctcagctacaagtagatgatgaaattattgctattaacaacaccaagttttcatataacgattcaaaagagtgggaggaagccatggctaaggctcaagaaactggacacctagtgatggatgtgaggcgctatggaaaggctggttcacctgaaacaaagtggattgatgcaacttctggaatttacaactcagaaaaatcttcaaatctatctgtaacaactgatttctccgaaagccttcagagttctaatattgaatccaaagaaatcaatggaattcatgatgaaagcaatgcttttgaatcaaaagcatctgaatccatttctttgaaaaacttaaaaaggcgatcacaattttttgaacaaggaagctctgattcggtggttcctgatcttccagttccaaccatcagtgccccgagtcgctgggtgtgggatcaagaggaggagcggaagcggcaggagaggtggcagaaggagcaggaccgcctactgcaggaaaaatatcaacgtgagcaggagaaactgagggaagagtggcaaagggccaaacaggaggcagagagagagaattccaagtacttggatgaggaactgatggtcctaagctcaaacagcatgtctctgaccacacgggagccctctcttgccacctgggaagctacctggagtgaagggtccaagtcttcagacagagaaggaacccgagcaggagaagaggagaggagacagccacaagaggaagttgttcatgaggaccaaggaaagaagccgcaggatcagcttgttattgagagagagaggaaatgggagcaacagcttcaggaagagcaagagcaaaagcggcttcaggctgaggctgaggagcagaagcgtcctgcggaggagcagaagcgccaggcagagatagagcgggaaacatcagtcagaatataccagtacaggaggcctgttgattcctatgatataccaaagacagaagaagcatcttcaggttttcttcctggtgacaggaataaatccagatctactactgaactggatgattactccacaaataaaaatggaaacaataaatatttagaccaaattgggaacatgacctcttcacagaggagatccaagaaagaacaagtaccatcaggagcagaattggagaggcaacaaatccttcaggaaatgaggaagagaacaccccttcacaatgacaacagctggatccgacagcgcagtgccagtgtcaacaaagagcctgttagtcttcctgggatcatgagaagaggcgaatctttagataacctggactccccccgatccaattcttggagacagcctccttggctcaatcagcccacaggattctatgcttcttcctctgtgcaagactttagtcgcccaccacctcagctggtgtccacatcaaaccgtgcctacatgcggaacccctcctccagcgtgcccccaccttcagctggctccgtgaagacctccaccacaggtgtggccaccacacagtcccccaccccgagaagccattccccttcagcttcacagtcaggctctcagctgcgtaacaggtcagtcagtgggaagcgcatatgctcctactgcaataacattctgggcaaaggagccgccatgatcatcgagtccctgggtctttgttatcatttgcattgttttaagtgtgttgcctgtgagtgtgacctcggaggctcttcctcaggagctgaagtcaggatcagaaaccaccaactgtactgcaacgactgctatctcagattcaaatctggacggccaaccgccatgtgatgtaagcctccatacgaaagcactgttgcagatagaagaagaggtggttgctgctcatgtagatctataaatatgtgttgtatgtcttttttgctttttttttaaaaaaaagaataactttttttgcctctttagattacatagaagcattgtagtcttggtagaaccagtatttttgttgtttatttataaggtaattgtgtgtggggaaaagtgcagtatttacctgttgaattcagcatcttgagagcacaagggaaaaaataagaacctacgaatatttttgaggcagataatgatctagtttgactttctagttagtggtgttttgaagagggtattttattgttttttaaaaaaaggttcttaaacattatttgaaatagttaatataaatacataattgcatttgctctgtttattgtaatgtattctaaattaatgcagaaccatatggaaaatttcattaaaatctatccccaaatgtgctttctgtatccttccttctacctattattctgatttttaaaaatgcagttaatgtaccatttatttgcttgatgaagggagctctattttctttaccagaaatgttgctaagtaattcccaatagaaagctgcttattttcattaatgaaaaataaccatggtttgtatactagaagtcttcttcagaaactggtgagcctttctgttcaattgcatttgtaaataaacttgctgatgcatttaacgagtgggtcgtctttttcttaggtgtatgtgtctgacctcaggccttttagccatatttcagtatgtggccttttttgatgttatgttttatccagtagctttactaaggtataattgatgtaataaactgcatatatttaaagtgtatactttgacaaattttgacatggtgtataccttcgaaactatgccacagtctggatgtgtttactgaaacattttaataaggaagtttatttttgataaagttatgtttttggatacaatatatttgtatggtgagagtgatgaattgttggatcatttgaataaaatcttttactaaccccatgataaaaggagaagacaacagtgagcttagaatatctataaagcaaaaaatgtagtctcttgtttaaaaaatctggagcgggaatgcaaggatacaaaactttagcatgctttgagcaaaaatttaaacttactggaatcttttataataatgtaagtggaatggaggattctaggaactgagaactgtattggaataggttcaaaatatgtaagaaatgctaatgtgggagataaaaattttatttagtacttattctgattattattaaagtaataatgtgttccttgaggataacttgtcaaatgccccaaagcataaagaatataattctgaatcccaaattccaaagacaagaactctgtgtttgaattcattctgcatataattatttataagtatagattgtgaatttttccatgttcttaaaattatttttatcttttttcatggttgcatagtgctccattgtttggccttggtaatatttagttgataattccattactgtgtatttttcacttgtttctaagatcaaacattttaatatgtgcatgttatatataaatatgtaaattctgtgatactctatgatcatctctttctttatattattttcatagacatgaaatagttgctcagagattatgcattttaagacactcatagtatatattgccaaagtggtttccagaaaggcactgctggcttcgactcctataagcagcacgtgggcttgttcatctcactgcatgtttatgaagatacagttcttttgccttgttctctgcctgatgtgtatgcagaggcagccctcaatatgcagtggttgaataaatgaatgaagaaaccactatcaaaaaaaaaaaaaaaaaa

SEQ ID NO: 2419 - DNA, 3678 bp, Homo sapiens
atgccgttctacaggcgcacggtggtaccccagcgcctgtgcccgcgcaacccgccgcagcagctggcggagctccgcgacgtgagccacctggcagcgctcagcctgctccggcagctcgccgacctctgtggccactcgttggctctgctcgaggacctcgaggggcacctgctggccctggggcgccgcacagacagcctgtaccggcgcaccgtgcgcctccgccgccgccttccctgccgcctgcttggcccggaggaggacgaggaagagctagctgcagctaactcgggtcgggaaaatgcgacagcgactgcccactcgaggtcgtcatggcgacagccagtgaacgtgttcctctcctcgggcaggcccccgagtgtagaggagctgcttcgggaggcgcagctcaatctccagagcctgttgcaagaagaatatgaggaacagtactcggaggccagacttgtggggcagaccttccgctcttctgatgaggccactaagcccacccccaacccaaggccccagtctgccaggcgtctggagtttatattgatgcctacaaaacggcagctgagcgaggatgagactaccacccagggtgtgagggcccccgaggcctccctgagcctgtctaccacagccgacaagcaaactgcctggaatagccttttccctctgcccatcctagaggagaagcggtggcctcagctttgctccacgcagtctgacattgtgcccatcaacatctctgggcagcagtttgataaacatgcaagtttgcgacactcgttgtttaacacagagacagccgtgaaccccaagtccaccctgaggcggaggcggaccattattggattctctaacttttcccagcgagaccaaggtcacagcaacagcccagcaggcagtgtggcccactctaccacctccgacatcaggcccagtcactcagttccagaaggggttcatggaagagttgcagttggtcaggatgctcggttcccaagtctcacctcgccagtactgagaactccttccagtgagccggacgaacctcaccaggcacggagtggcccaaaccctcctggcatggagagcatgggaatggtgtacagtgtccccagttcttgcaatggacctacagaatcaaccttctccacttcctggaagggagatgcttttacctacatgactccaagtgccaccagccagagcaatcaagtcaatgaaaatgggaaaaatccttcctgtgggaattcttgggtctctctaaacaaagtcccacctctggttcctaaggaggctgctaccctccttgtcgctcgtgataacccagcaggatgcagtgggtcagctggctaccctgagcgccttattcagcaaaggcacatgcccgaaagaccctccaagattggccttctgaccagtgggacctcgaggctggagacaggccccggtggggccagcagattccgggagcggtcactgtctgtgcccacagactcaggcaccacagatgtggactatgatgaggagcagaaggccaatgaggcctgtgccctgccttttgccagtacgagctctgagggcagtaacagtgctgacaacattgcctcccttagtgcccagcaagaggcccagcacagaaggcagaggtccaagagtatctcacttaggaaggccaaaaagaagccttccccacccacacgcagtgtctcactggtcaaagatgagccaggcctcttgcctgaaggtgggtcagcactacccaaggaccagaggcccaagagcctttgcctctccttggaacatcaaggacatcactcgtcccacccagatgctcagggtcacccagctattccaaaccacaaagatccagaaagtacacaattctcccaccactggtatcttactgactggaagtctggtgacacctaccaatccctgtccagctccagcactgccactggcaccacagtcattgagtgcacccaagttcagggcagctcagagtctcttgcctcaccttccacctccagagccactacaccttcccaactctccattgaagtggaggccagggagatatcatccccgggaaggccccctggactgatgtcaccctccagtggctactccagccagtcggaaacaccaacacccactgtttccatgtccctgaccctgggccacttaccccctccaagcagcagtgtccgggtacgtccagtggtacctgagaggaagtcatcactacccccgacgtcaccaatggagaaatttcccaagtcacggctatcatttgacctaccactgacctcttcacccaacctggatctgtctgggatgagtatctccatccgaagcaaaactaaggtgagtcggcaccactcagagacaaattttggcgtcaagctggcccagaaaactaatcccaaccagccaatcatgcctatggttactcagtccgacctacgttctgttcgcctgaggtcggtcagcaagtctgagccggaagatgatattgagagccctgagtatgccgaggaacccagagcagaagaagtcttcaccttgccagagagaaagacaaaacctcccgtagctgagaagcctccggtggcccggaggcctccaagcttggtccacaagccaccatctgttcctgaggagtatgcactaacttcaccaaccttggctatgccccccaggagctcaattcaacatgcgagaccactccctcaagacagctacacggtagtgcggaaaccaaagccctccagcttcccagatggcagaagcccaggggagtcaacagcaccctcatctcttgttttcacgccttttgccagttcctctgatgctttcttctcaggaacacagcagcctccccagggaagtgtagaggacgagggccccaaggtgagggttctgcctgaaagaattagcctccagagccaggaagaagctgagaaaaagaaaggcaagattccacctcccgtaccaaaaaaacccagcgtgctgtacctgcctctcacttctcccacagctcaaatggaggcctatgtggcagaaccaaggctgcctctcagccccatcatcaccctggaggaagacaccaagtgtcccgccaccggcgatgacctgcaatcacttggtcaaagggtgacttcaactcctcaggctgacagtgaaagggaggcaagccctctggggagttctgtggaaccaggcaccgaagaaaaaagtttaatcagtgataaaacagctgaatggattgcagaggatgatgatgacgtgtttgtggcttcacgcacaactgaagatttatttactgtgatacacaggtccaaaaggaagctgctcggctggaaggaacctggtgaggcctttgtgggtggcagaacgagttcccactcaccaataaagaacacagctgagtctccaatcagtgagtctaccgccactgcagggtcaggcagcagtgccaacctagatgctggcagaaatgacgatttcaaggccttgctacagaagaagggaagtaaggcaactccaaggtctcgtccctcagcagctgaacttctgaagaccactaacccactggctcggagaattattgcacaattttcaaaagactatgaaaccaccgataaccccagtacctaa

SEQ ID NO: 2420 - DNA, 4224 bp, Homo sapiens; identical to SEQ ID NO: 1126

SEQ ID NO: 2421 - DNA, 4231 bp, Homo sapiens
ccctgagctgtgactttgctccgccggtgataatttccaggttactgtgtaggagcgtctggcgcagcatcgtgtgcggaagaccgagagagggagtgtgcgtgtgagcctgtcaggccgggcgggtccatatccgggtggaccgggtgggtggggctgcccctccctccaggtcccgaggtggataaggggtggggagtgacgtgcagagattccctttcgccccttcggatccaagagagggtggcagaaggaatgcgtgggtgacttggcgtggatttagggcgtgcccaccctgcagatcggcctcctagagtgtcccgagggcctgagaggccgcagggacacgaaggaagagaaggaggaacccgaagagggctcgcctagccggccacccgctccgaacttgcccgggaaactagtgcggagggaggggccgggccctggccgcggcgggaggaggggcggccgcagctgcatccagccccgttggcttccttcccagctctccttcgcctcctcctcctcttcctcctgtatgagtcaggcatttcccggggatttggagcaggcacgcgcggcccgggcgtccggagctgtagcagcagcagcagccgccgtgccggggccgccaccgcggcgggcacccgcgtcccgggcgcccacggaccatggagagggcagtccagggcacagacggcggcgggggtagcaacagcagcagccgcagcagcagccgtgctacctcggcgggctcctcgccctcctgctctctggcgggccggggggtctccagccggtcggcggcggccgggctcggcggcgggggaagccgcagcagcccgggctctgtggccgctagcccgtccgggggaggcggccgcaggagggagccggcgctcgagggcgtgctcagcaaatacaccaacctcctccagggctggcagaacaggtacttcgtactggatttcgaggctggcatcctgcagtattttgtgaatgagcaaagcaaacaccagaagcctcgaggagtcctgtctttatctggagccatagtgtccctgagcgatgaagctccccacatgctggtggtgtactctgctaatggagagatgtttaaactgagagctgctgatgcaaaagagaaacaattctgggtgactcagcttcgagcttgtgccaaataccacatggaaatgaattctaagagtgctccaagctcccgaagccgaagtctcactttgctcccacatggaacacccaattctgcgtctccctgtagccagagacacctcagtgtgggggcccccggtgttgtcacaatcacgcatcacaagtcgcctgcagccgcccgaagagccaagagtcagtattccggccagcttcacgaagtcagagagatgatgaaccaggtggaagggcagcagaagaaccttgtgcacgccattgagtccctgccagggtccggccccctcactgccttggaccaggacctgctgctcctgaaagctacctctgctgccaccctcagctgccttggggagtgcctcaacttgttacagcagagtgtgcaccaggcgggccagcccagccagaagccaggagcctcggaaaacatcctgggatggcacgggtccaagtcacattccacagagcagctgaaaaatgggacacttggctctttgccatcagccagtgccaacataacctgggcaattttaccaaactctgctgaagacgaacaaacctcacagccagagccagagccaaactcaggctctgaattggttttgtctgaagatgaaaaaagtgacaatgaagataaggaagagacggaattgggcgtcatggaggatcagcgtagtataattcttcatctcatttcacaactcaaacttggaatggatttgaccaaggtggtgcttcccacctttatcctggagaagcgatctttgctggagatgtatgcagatttcatggcgcacccagacctactgctggccatcaccgctggggccacaccagaggagagagtcatttgcttcgttgagtattatctcacagcctttcacgagggccgcaagggcgctttagccaagaagccctacaaccccatcataggcgagacatttcactgctcctgggaagttcccaaggacagggtcaagcctaagaggactgcttcccgctctcctgccagctgtcacgaacacccaatggccgatgacccttccaaaagctacaaactaaggtttgtggctgagcaagtgtcccatcacccacccatctcctgcttctactgtgagtgcgaggagaagagactgtgcgtcaacactcatgtatggaccaaaagcaagttcatgggcatgtccgtgggggtctctatgataggggaaggtgtgttgaggctcctggaacacggggaggagtacgtattcaccctgcctagtgcctacgcccggtccattctcaccatcccgtgggtggagctcggaggaaaagtcagcatcaactgtgccaagactgggtactcagcgacagtgatattccacacgaagcctttctatggagggaaagtccacagggttaccgcagaagtgaagcacaacccaaccaacaccattgtttgtaaagcccatggggaatggaatggtactttagagttcacctacaacaatggagaaaccaaagtcatcgacacaaccacactgccagtgtatcccaagaagatcagacctcttgagaagcagggacccatggagtccaggaacctctggcgggaggtgacccgatacctgcggctgggggacattgacgcagccaccgagcagaagcggcacctggaggagaagcaacgggtggaggaacggaagcgcgagaacctccgcacaccatggaagcccaaatattttatccaggagggcgatggctgggtatacttcaatcccctctggaaagcacactgatggggtggaggtgcagagctttccagtatagccctgtttttgtaggaatattaaagtagtagagtatcagggttttgttggcattcactgagaccttgtattagcatccaagaaatgatgagagagagagaaattatatactatgaaaagtgcacccccacactctgctagaggaatgaatttattcaagagccattcggggcacgtgtgtgtacacaccgtatacgttcacacacatgcactatgtaaacatctgagtatgattacacatttaaatactgcactcaccaaggttaaagtgggtaatcataagctcctttttatcaatgaagtttgaagtttttctatttttcactttgccaaaaatgttttacactcacaaagatattctcacttagtcaactcctgtcaaaatgaaggtgaactggcatggcccgatcactgtccataagggagaaagtggctcattcctggtagaagtatgggtggttatcatttcaaaattattgtgattctcacctccctccccacctcagtgttttgtctgtccgcgcccaagaaagataagcaagtatttcctgctggatgggggttggcaggaagctgttaaagatttatgccagagccttgcaggatggagcacctctgggacaactaagagccaaggcccaccaaggagttttccacccgtctctcatggtcacagcgctagtcattcatttttgagaagttgcttcttttacatcagaaaaccagtcaatcatatggagacttcttttgtgatgaaaaagggctttagaagttaaatacatgcatgcacatgaaaacatgcacaaccacagcctcaatcttgtatttagtttggggaaagagaagagaatttcctgtggattattttttcctcaagtgcacctctctggttaacccaaactctgcaagaaagcactgtgactaaaacatacataacgcctgcataaatattccatggtttcagttaaatttcagtttttagcctttacacatgaggtcaaaggagtgacgaaaatacaaagcaaggaaaaaatgaaatatctggtttttgctgaatgcttaatttattttttactgtgccactccaatatttatcaaatccaaatagcatgaatgcttctctgtagtaatactaattttgtgccttttgtctgctttcttaagaccagttgttcacactttgtagatattagacaaatatatttcgattgaatacaaaaaaaaaaaaaaaaaaa

SEQ ID NO: 2422 - DNA, 11191 bp, Homo sapiens
ccgcgcgaacatggccgaagtcggcgaggacagcggcgcccgcgccctgctcgcgctgcgctcggcgccctgcagcccagtgctgtgcgccgcagccgccgccgccgccttccccgcggccgcacccccgccggcccccgcgcagccccagcctccgcccgggccgccgccgccgccgccaccgccgctgcctccgggcgcgatcgcgggcgcgggctcctccgggggctcctccggggtatccggggactccgcggtcgcgggcgcggcgccggccctggtggccgcggcggccgcctcggtacggcagagcccggggccggcgctggcgcggctggagggccgcgagttcgagttcctcatgcgccagcccagcgtcaccatcggccgcaactcgtcgcagggctcggtggacttgagcatgggcctgtccagcttcatctcgcggcgccacctgcagctcagcttccaggagccgcacttctacctgcgctgcctcggcaagaacggcgtcttcgtggacggggccttccagagacgcggcgcgcccgccctgcagctgcccaagcagtgtaccttccggtttcccagcacggccatcaagatccagttcacgtcgctctatcacaaagaagaggccccagcctccccgctgcggccactgtacccccagatctcccctctgaagatccacatcccggagccggacctccggagcatggtcagccccgtcccctccccgacgggcaccatcagtgtccccaactcctgcccagccagtccacgcggtgccggctcctccagttaccgctttgtgcagaacgtgacctcggacctgcagctggcagcagagtttgcagcaaaggccgcgtcggagcagcaggcagacacgtctggaggagacagccccaaggatgagtcaaagccgccgttctcctacgcgcagctgatcgtgcaggccatctcctccgcccaggaccggcagctgaccctgagcgggatctacgcccacatcaccaagcattacccctactaccggacggccgacaaaggctggcagaattctatccggcacaacctctctttgaaccgttactttatcaaagtcccacgttcccaggaggagcctgggaaggggtccttttggcgaatagaccctgcctctgaagccaagctcgtggaacaggcattccggaaacggaggcagaggggtgtctcctgcttccgcacccccttcgggcctctgtcctcaaggagcgctccagcttcgcccacacaccccgggctgatgtcccctcgctccggcggcctgcagaccccagagtgcctgtctcgggagggctcccccattccacacgaccctgagtttgggtccaagttagcttctgtcccagagtaccggtattcccaaagcgcacccggctcccccgtcagcgcccagccagtgatcatggccgtgcctccccgaccgtccagcctcgtggccaagcccgtggcctacatgcccgcctccatcgtaacctcacagcagcccgcgggccacgccatccacgtcgtgcagcaggcccccaccgtcaccatggtcagggtggtcaccacatctgccaactcggccaacggatacatcctcaccagccagggcgcggcggggggctcccatgatgcggcgggcgcagccgtgctggacctgggcagcgaggccagaggcctggaggagaaacccaccattgcgtttgccacaatccccgcggctggtggagtcatccagacggtggccagccagatggcccccggggtccccggacacacggtcaccatcctgcagcccgccacacccgtgaccctcgggcagcaccaccttccagtccgggccgtgacccagaacggaaagcatgcggttcccacgaacagtttagccggcaacgcttacgccctcaccagccctttgcagctccttgcgacccaagcgagttcatccgcgccggtggtggtcacccgggtgtgcgaggtggggcccaaggagccagcagcagccgtcgcggccacggccaccaccaccccagccactgccaccaccgcctctgcctccgcctcttccactggagagcccgaggtcaaaaggtcccgggtggaggagcccagtggggctgtaaccacaccggctggagtgatcgcagctgccggcccccaggggccaggcaccggggagtgaggtcacctgcaacgcgggggagtgggactcacccagcggcgaccccgaagctggacccggcagctcaggcggccgcacccacagacggaggagaacagcccgcggcggcctgtgggcatcggcggcacctggacacacccagccctttccatttgatcgcctgccttcccgtggtttaagacaaaaacacataaacaagttcagacaactgattgtatgattctgggaattctttgctttcctttccttctccctcggcaccacctcctctccccaggcctccctgtcgggcatggggaggaggttggagctcagcatcttgaggaatgtgtcaagacagcccctccgctccgcgctgcacggccagccgcctttgtccgggaggacagacagaaacgcagcaaggcacacaccaaggctgccggggaggcccgggcaccggacagatgcctgttgggaagccaggagctgccgagccacggaccacctaacagcctctccgcccggaacgtgacatagagagtgttggcattaactcggggggtgtccgatttcacttcagaccccaagtttttctttgtttgtttaaacatggaattcagacttcattgtacacctgagacagacacaaaagggatcatgtatttttgaggattttacctgttgacgtctgatgaccggccgtaggtccagggttcccgctgggtttaatcccctcgaagagtaaacctgccgctctgtctgataacttcaagtaagagcagcggcttcctgggttggcgttcgcggtggaaggttcctaggatgaaaggtgagcctggatccgccggccgcagacatcgcgctgctggggacgattggggccgctgctctgcagaccagaccttcccgaattatccgtggctccgatgtcccggtgctgacggccacatggggacctaacagtgccaaacgccatctgctccagctgctttttcacccagttgcagagtcctcaccactcccacattgatctgctgttttcaattggaaccatttctcctgcctgaaactccagggcccctccctgggctgtccgtgagcaggagaccccaccccagcagcagtggtgagcaggcctgtgcctccacgcccagcccccgccaacgcgactggttttgtttgccacacggtgagaaccggaggacgggatgctccagccagttgggtggttctggggtccctgaggaagccccctcctgcacttccattaagacagccagtggttcctggatctttgtcaccaagcagcgttgagccagagctgtctaatgctgagcccagctcaggaaggagagaggagtccttcagtgtgtcttggagatgcgaagtgcgtcctcgtaaaggtcagctgtcagttttgctggccgctccggcgctggctctcctgtccgggaccacaacgagaaacagcgacagattcgacgcagagctccggaagtgcctgaggagcagtggttcttggaaatcgcccgtcctccgcatcacagcctctcaccagcaaagcagcctctgcccaggccctggcgggagagctgcagagggacccaggtgcctggagggcatttgagggaggtggctggacaggtgtctccctgaagaagaagggagaacacttttcaaagtgattccgaggcagtgcgggaggacacacgtgctgtgcagtggagtggggtcgcccgtggcccccatcagagtccccgtcccccaggacaagtgcagaacctctgtgggccccctccttccacctagatagagaaaaccccttgttcggtttccttcccgtgtcccgttgtttttctaagccccccgaattgagtcgtttctatggcactaacctttccatgggaaataagctctttgtggaagtccgtacctgttgccctgggtgaggtttcagagaaacgggggcaggatgaacacagccggctgtcctgggtgcagttacgtccgtggagggtgagagattgcgccccgttccacacttgtgtcgcctgctgttgtctgtgggccttttctttccgtggtgcctggtgtgtgcgtgcatggcgtgagagaacggggggtgggggttggaggtggctccccgacaccggtgcctgtgtggcctgagccggcgccctcccgggagcgcccgtcacggggggcctctgtgattacctgctgctgctctctcccgcgtggtgactatatgtcctcagggctgcctgtggccaccctgatgggagacctctgtttgcttctgggccactgcaggttggcctcctcaatacaagctgatgtctgcagggagcgccgcgtgctgggattgcaccacgtgttggtcacaaatcgaggtcgccttttggcctggtctgctcaggctggccctgacccacgtggtttcctggcttctgagacgcagcgcattcttcctgttagcggtagcgttctctgatttcactgcttcattgccaagggcgtggaaagggggtggtggatggagccgggaggtggcgagcacaggaccccggggctgcattctgccgtgtggggttctgcactgtctagcttctgcggggactgcaaagagggatgaagggacgtggtcctaggggtcggctcagactcggagcagggcagggagaggagggcaaggagaggaggcctgggtcctggatccactgctctgggctcataaccatgagattttgaaagagtttttggtcatctgagcaggtaccatgcctggctcatgccggaacttgtcttggaaccggtagccagaggcccaggaagggacagggcccaaaagggttgcatgtcccggccacaaagccctccctgtgtgccctgagccagcccagcaagcgcctcccagccaggcgctttcgcagaagcaagagcacaggccagggggaccgggagagcctcagcccccagcctgggcggcctgtgaccctgagccgtgtggagccaggacccaagaaccttctctaggttctcaagggtgagctgacccgggcaatgtgcaggaatgtggggagcaaaagtagctgattccagccccgttctggggtcactggggaggcagaggctgagggcctgttctctggtcaccagggactgggggcacggtccacagcggatgagaacagcaggtcacagtagtggctttgggaagggcccctcctgctttgccctgttcggaaaggggctccctcagagcccctgggcccagtaacccgcttctgtctcctgactcctgctggataaattgccaggtttatcaaatacaagaaaacacctgctttggctaggaggtaagtcccaaaaagaacgtcttaagtagagcaaaggcatccaccgaggccatttggtggcccctgggaagtggggaagcagggcctgagcgtccccaggctgctagggcagcagctggctcagggcacactctctcgtgccagcttctgccaccagcccagtgtccacggagccgcggggccagaggagctcagggagacctggctgtctagggcatggtacccagtatcccggtgtgtgcccatcctcagccacttgtgtctttctttccatgtgggagttctcccggtgacacctgccctccgttgagggtggaatctgtcactcatgcctttgagggacccagatggaccatccctcttctgcttgctttctacattcctaaaaacctcaacgttaatccctcaccagtcgggccgagtgtggcctcatggttctgccgcggcccagtcttctcccactggcttcacgctagagggcgccatgcgctctgggtgaaatgagacgctggtgtggggtccccatgtagagaccctcaggtccctatccagagaccctccaggcagtgctgggaagacactggtggcggggaccatgaccaggcgggtggagccatgtgtgtctcacacctgccgcccctcactttccttcccgaggtctggtaggtcctctttgggatttgctgtttatttgtatctcccttttctttgatttaagaacaatgccaagtgaaaaagctgggaatgaatttctgagttgctgagtgttccctgctcctaggtaccacgctctgtgcttctcaggcagggaggagatggattcggtggagttgggccaggacgggggcttcaccctgccccctccagactgccgaagcccccaagaagttttgagcccagctgggcctcgcctccccggctcctgggtccattttctgtactggtttgagatcacaggcatcattcagcgaatgctcttgtgtcctctgcataaagagggccctccctggagcacccccggggagctgggactctccagaaagccccgggtgagggctccgtcttgagagagagagaaatcccttctttgggcgattcagtgagttcaggaggaggaggaagcttttccttggctttgaaatcagtgtttttatggagacaaagaacagacctcagtgggaaaaatgaaaacgtaatggaacacggggaggtgtcggagaagaaaggattttccccttcgctttcagagccggcgggagtgcaggtctgttttgcttcagaagcctcacattctgctttgcccttgagtgacttcatgcgggatgaggaactgttgacccctctagagaggacaccccaagtccatcctgggctcctcctcacccctctgagaaagcccccctaaaaaaaggcttcagagtcaccggcatgccgcctcacgttgcaggacggaatcgcgcgctcctcacgctggagtaagttacgaaacatgatcgtcaggctctttgcaaacgcagagccccagaacgctggatggaggcctcctcggccctgcgggcggcctggctgcggtaggtctgctgcaaggagccaccacggggactgcgccacactcctgatgaaaacgtgtttacccacagcctcgcctcgagcctccttgacaataccgctgcttcaaagcaatattatttaatgagaatactttacattgctcacatgtgctgctatgaagacaggattagtctgtagacgggactcagctccagaggttcctgggtaatgtattgtggctcttggaaatgagggtagaatttgaaatataacaaatggtctctcgcccggttctgtcccttatttttagattgttttcctgcatcttacaatttccttttcttttcaaagttcctttctccaggcctgtttttcagtgctcaggacacggttttcatcacatacttactgtttttttggttgggttttgatacgaaaagctgctacgtttggtgaccagagggagggtttggaatctgtgctttgcaggggatctcggtgggtaccgcggcccctcgcagggtggcgagtggggtccgtgcctcgagaagggggcccttacccacaccgtgcggcttgaattctgtcggagttgaatctgtggaaaggattgtcccattagagctgctgcgtcctttcctctgtcctccctgtcacccaaaccccgaagtcacagctgcttagaagaatgggattttggggatacaaccacacacatttccctctggactgaaattttaaaaacagacccatttcactgacttctttttttttttttttttttttttttttttgagacggagtctcgctctgtcgcccaggctggagtgcagtggcgtgatctcggctcactgcaagctccgcctcccgggttcacgccattctcctgcctcagcctcccgagtagctgggactacaggcgcccgctaccacgcccggctaattttttgtatttttagtagagacggggtttcaccgtgttagccaggatggtctcgatctcctgacctcgtgatccgcccgcctcggcctcccaaagtgctgggattacaggcgtgagccaccgcgcccggcccactgacttctttagggaaaatagtttcagtcttgggttgtcttgtgagcccacgggcatgggaccctgtctctgctgggcttttccggccccgtcccagctcctcctcaggcagaggctgcagccctcagctctgctgctggatggaacatttcaaccccctccgggaaggtgggcagggtggagggcccagggctaggcctgccatgcaccatgagcaggggtgctacctgggtgtgtgaagttgggctggcttttcctggaggtgggtgagaaggctctccgggcaaatcagaaggccacgagagagagaggagcggggagagtggtgaggaggattcgtctctgactgatgaacctcgccgtgcctgtctgtcacatccaagtctgtgccagctgctgggaggtcagactcctgccctgagaaacagcccagtccttggagaatgaaaccctgagggtcagtgagtggaggccttccctcggggccagccattcccgggaggcctgagtgtgacctggaagctctgtgggtcaccaagactggcattttccttgtatttttgtgcagggctgaagtgagcgttcctcctctgaattggtgaggctttggaaattttttgtttcttctactcatcctaatggctggttttggctgcccggagtatcagagaatatcactaagagggcagtcagtttatttttaggcatctttctttctgtccagggagaaacccctcggaagaatcttagtcactctttgcacctgccctgtcattctcgccatggggaaaatgcgttgaaaagaaaaataccggggccagggagaagccgtgaatgtatttatttgctttggtgaagctgctgaacactggctgcggagggccccccgcccccatcccgcttcaggccccagtgacccagttgcgtcttaagttccatcgtccagatttcaggccaccagaggctgccaaaggtgactgaagcggtctccaagtcactctgtcaccactttttttttttttgagatggagtctcgctctatcgcccaggctggagtgcagtggcccaatctcggctcactgcaacctccgcctcccaggttcgagcgaattctcctgcctcaacctcccaagtagctgggattacaggcacctgccaccacacccggctaatttttgtatttctaatagagatgagagtgttaccatgttggtcaggctggtcttgaactcctgacctcaggtgatctgcccacctcaacctcccaaagtgctgggattataggcatgagccaccgcgcctggcctctgtcactttttttgctccttacccagtttttgttttttgttgttttgttttgttttagcgtgatactacaatggaaagactcctagttggttattctttatctcggattcttttttctggaattgtttgctcatttgagtggttggtggtttgccctgtgtcagacacggtgaaaagagtgcaggaaagctggggccaggggaagcgaagtggcttcaatccgggctgacagccaagaagagttttcctcccttcggtgacagggcctgcccctccgagtctagaggtaaaagcagcttctagaactggcccctaagtctccaaatgtgttggctaagctgaaatgagagactctgaattagagtttttgtttgtttgtttgttctctgcatgaagttcacaggcctgtatggatgttaaattgtgtctatagcctctaaatctccaggttaactggtccagattttttttttttaatcagtaacaatgggaatttaaaatcaaatatttggccaggtgcggtggctcatgcccgtaatcccagcactttgggaggccgaggcaggcgcatcacctgaggagtttgagaccagcctgaccaacatggtgaaatcctgtctctactaaaaatacaaaaaattagccaggcgtggtggcgtgtgcctgtaatcccagctaccagggaggctgaggcatgagaatcgcttgaacctgggagatggaggttgcagtgagccgagatcatgccactgcactccagcctgggcaacagagggagactctgtctcaaaaataataatcaaatcaagtattttaagtttggctcttctttttttcaagaaaggctttttggatacctagaataccttcatgtatgtggcttgatttctgtttcaggaaaaggggggcgggaggagagacaacagccgtgttccagagtctgtcctgagatgtcgctgagtccagacacttgggctgcacgtgccctgcagatgacaaaggccggcagctcagcacacgtgcaggaggggttaaagccaatattgagtttttgttcttgttgttttaatctgaacgattattctcctgtaaaaataatttgggaggggcgggtgttgttcggtgtgtgtgtgtgtgtgtgtgtgtgtgtgtgtgtgtgtatttttttttttacagtggcgcctgtctaaagtatttttcacaacatgtttgataatcagtgctttaaaaagcagcagtgtcctatgaagtggaaatgtcagttctagagcattggatgtgaagttctggtcatgtcaccttgcgtgtctcaccctggaggagtgaaggtgggcgcccggcgggggggtgtggctgcaccccagcaccgggagggggcacgcacgacaccagaggaagggacagccccacccatgtcaacagcaggcaacctgtgttttcatttcaagtgggatacagtatttttttaataaggagccatacttttttttaagagtttgagatctgaatgtgatttctaattgtatcagacgttaatgttttaaagctataacaaagtttaaaatttctactttttgtttttcatttattttaactgttcttttatctattaaattgttgtatgtggatggggaagttttgtttctcctcttagcatttgtttctataaccagaaataaaattctatattaaagaaatgac

SEQ ID NO: 2423 - DNA, 8436 bp, Homo sapiens
aagatggcggctcccacaattgtggtctgagcgccggcggggctgcgacgaccgcggcgcttgtggctcctttccacccgccccggaagccggccagtgctggggacttgggggtgtgggaaccgggccggggctccgccatttccggcgggggagggctacgactgaggaagggaggagagagaggcggctcaagatggcggctcccagggcctcccgcccgagcttgtaagcgggagcgcccggacaagtagtcggggcgacgggactcagcggcctccagcttcttgagcctaggcgctcgacagtttcgggcggctcttgcggagacggggtgagcgagaagaaagggaagagccaaagggaaggagggcagttaagatggcggcctccatggagtcgtctaccgctgtgtgagaaaccgcttctccgtgagagctgccttagacgaaagggggtgtgtgaaaggaattgaggggctcccttcccgcttgttgacttctccccaccgcaccctttcccggaactatggcttcggccgtgtcgcccgccaacttgccagcggtgcttctgcagccccgctggaagcgagtggtgggctggtcgggtccggtgccacggccccgccacggccaccgcgccgtggccatcaaggagctcatcgtggtgtttggcggcggcaacgagggaatagtggacgaactgcacgtgtacaacacggcaaccaaccagtggttcatcccagccgtgaggggggacattccccctgggtgtgcagcctatggcttcgtgtgtgacgggactcgcctcctggtgtttggtgggatggtggagtatgggaaatacagcaatgacctctacgaactccaggcgagccggtgggagtggaagagactcaaagcaaagacgcccaaaaacgggccccctccgtgtcctcgactcgggcacagcttctcccttgtgggcaacaaatgctacctgtttgggggtctggccaatgatagcgaggacccaaagaacaacattccaaggtacctgaatgacttatatatcctggaattacggccaggctctggagtggtagcctgggacattcccatcacttacggggtcctaccaccaccccgggagtcacatactgccgtggtctacaccgaaaaagacaataagaagtccaagctggtgatctacggcgggatgagtggctgcaggctgggggacctgtggaccctagatattgacaccctgacgtggaataagcccagtctcagcggggtggcgcctcttcctcgcagtctccactcggcaaccaccatcggaaataaaatgtacgtgtttggtggctgggtgcctctcgtcatggatgacgtcaaagtggccacacacgagaaggagtggaagtgtaccaacacgctggcttgtctcaacctggataccatggcctgggagaccatcctgatggatacactggaggacaacatcccccgtgctcgggctggccactgcgcagtcgccatcaacacccgcctgtacatttggagtgggcgtgacggctaccgcaaggcctggaacaaccaggtctgctgcaaggacctctggtacctagagacagaaaagccaccacccccagcccgagtacaactggtacgcgccaacaccaactccctggaggtgagctggggggcagtggcaacagccgacagctaccttctccagctccagaaatatgacattcctgccacggctgctactgccacctcccctacacccaatccggtcccatctgtgcctgccaaccctcccaagagccctgccccagcagcagccgcacctgctgtgcagccgctgacccaagtaggcatcacgctcctgccccaggctgcccccgcacccccgaccaccaccaccatccaggtcttgccaacggtgcctggcagctccatttctgtgcccaccgcagccaggactcaaggtgtccctgctgttctcaaagtgaccggtcctcaggctacaacaggaactccattggtcaccatgcgacctgccagccaggctgggaaagcccctgtcaccgtgacctcccttcccgccggagtgcggatggttgtgccaacacagagtgcccagggaacggtgattggcagtagcccacagatgagtgggatggccgcactggccgctgcggccgctgccacccagaagatccccccttcctcggcacccacggtgctgagtgtcccagcgggtaccaccatcgtgaagaccatggctgtgacacctggcactaccaccctcccagccactgtgaaggtggcctcctcgccagtcatggtgagcaaccctgccactcgcatgctgaagactgcagccgcccaggtggggacatcggtttcctccgccaccaacacgtctacccgccctatcatcacagtgcacaagtcaggcactgtgacagtggcccagcaagcccaggtggtgaccacagttgtgggcggggtcaccaagaccatcaccctggtgaagagccccatctctgtcccaggaggcagtgctctgatttccaatctgggcaaagtgatgtcggtggtccagaccaaaccagttcagacttcagcagtcacaggccaggcgtccacgggtcctgtgactcagatcatccagaccaaagggcccctgccagcgggaacaatcctgaagctggtgacctcagcagatggcaagcccaccaccatcatcactaccacgcaggccagtggggcggggaccaagcccaccatcctgggcatcagcagcgtctcccccagtaccaccaagcccggcacgaccaccatcatcaaaaccatccccatgtcggccatcatcacccaggcgggcgccacgggtgtgaccagcagtcctggcatcaagtcccccatcaccatcatcaccaccaaggtgatgacttcaggaactggagcacctgcgaaaatcatcactgctgtccccaaaattgccactggccacgggcagcagggagtgacccaggtggtgcttaagggggccccgggacagccaggcaccatcctccgcactgtgcccatggggggtgttcgcctggtcacacccgtcaccgtctccgccgtcaagccagccgtcaccacgttggttgtgaaaggcaccacaggtgtcacgaccctaggcacagtgacaggcaccgtctccaccagccttgccggggcggggggccacagcactagtgcttccctggccacgcccatcaccaccttgggcaccattgccaccctctcaagccaggtgatcaaccccactgccatcactgtgtcggccgcacagaccacgctgacagcggcaggcgggctcacaaccccaaccatcaccatgcagcccgtgtcccagcccacccaggtaactctgatcacggcacctagtggggtggaggcccagcctgtgcatgacctccctgtgtccattctggcctccccgactacagaacagcccaccgccacagttaccatcgccgactcaggccagggtgatgtgcagcctggcactgtcaccttggtgtgctccaacccaccctgtgagacccacgagactggcaccaccaacacggccaccactactgttgtggctaaccttgggggacacccccagcccacccaagtgcagttcgtctgtgacagacaggaggcagctgcttctcttgtgacctcgactgtgggccagcagaatggtagcgtggtccgagtctgttcgaacccgccctgcgagacccacgagacgggcaccaccaacaccgccaccaccgccacctccaacatggccgggcagcatggctgctcaaacccaccctgcgagacccacgagacgggcaccaccaacactgccactacagccatgtcgagcgtcggcgccaaccaccagcgagatgcccgtcgggcctgtgcagctggcacccctgccgtgatccggatcagtgtggccactggggcgctggaggcagcccagggctctaagtcccagtgccaaacccgccagaccagcgcgaccagcaccaccatgactgtgatggccaccggggccccgtgctcggccggcccactccttgggccgagcatggcacgggagcccgggggccgcagccctgcttttgtgcagttggcccctctgagcagcaaagtcaggctgagcagcccaagcattaaggaccttcctgcggggcgccacagccatgcggtcagcaccgctgccatgacccgttccagcgtgggtgctggggagccccgcatggcacctgtgtgcgagagcctccagggtggctcgcccagcaccacagtgactgtgacagccctggaggcactgctgtgcccctcggccaccgtgacccaagtctgctccaacccaccatgtgagacccacgagacaggcaccaccaacaccgccactacctcgaatgcaggcagcgcccagagggtgtgctccaacccgccatgcgagacccacgagacgggcaccacccacacggccaccaccgctacttcaaacgggggcacgggccagcccgagggtgggcagcagccccctgctggtcgcccctgtgagacacaccagaccacttccactggcaccaccatgtcggtcagcgtgggtgccctgcttcccgacgccacttcttcccacaggaccgtggagtctggcctagaggtggcggcggcacccagcgtcaccccccaggctggcaccgcgctgctggctcctttcccaacacagagggtgtgctccaaccccccctgtgagacccacgagacgggcaccactcacacggccaccactgtcacttccaacatgagttcaaaccaagaccccccacctgctgccagcgatcagggagaggtggagagcacccagggcgacagcgtgaacatcaccagctccagtgccatcacgacaaccgtgtcctccacactgacgcgggctgtgaccaccgtgacgcagtccacaccggtcccgggcccctctgtgccgcccccagaggaactccaggtgtcgccaggtcctcgccagcagctgccgccacggcagcttctgcagtcggcttccacagccctgatgggggagtccgccgaggtcctgtcagcctcccagacccctgagctcccggccgccgtggatctgagcagcacaggggagccatcttcgggccaggagtctgccggctctgcggtggtggccactgtggtggtccagccacccccacccacacagtccgaagtagaccagttatcacttccccaagagctaatggccgaggcccaagctggcaccaccaccctcatggtaacggggctcacccccgaggagctggcagtgacggctgctgcagaagcagctgcccaggccgcagccacggaggaagcccaggccctggccatccaggcggtgctccaggccgcgcagcaggccgtcatgggcaccggcgagcccatggacacctccgaggcagcagcaaccgtgactcaggcggagctggggcacctgtcggccgagggtcaggagggccaggccaccaccatacccattgtgctgacacagcaggagctggctgccctggtgcagcagcagcagctgcaggaggcccaggcccagcagcagcatcaccacctccccactgaggccctggcccctgccgacagtctcaacgacccagccattgagagcaattgcctcaatgagctggccggcacggtccccagcactgtggcgctgctgccctcaacggccactgagagcctggctccatccaacacatttgtggccccccagccggttgtggtggccagcccagccaagctgcaggctgcagctaccctgaccgaagtggccaatggcatcgagtccctgggtgtgaagccagacctgccgcccccacccagcaaagcccccatgaagaaggaaaaccagtggtttgatgtgggagtcattaagggcaccaatgtaatggtgacacactatttcctgccaccagatgatgctgtcccatcagacgatgatttgggcaccgtccctgactataaccagctgaagaagcaggagctgcagccaggcacagcctataagtttcgtgttgccggaatcaatgcctgtggccgggggcccttcagcgaaatctcagcctttaagacgtgcctgcctggtttcccaggggccccttgtgccattaaaatcagcaaaagtccggatggtgctcacctcacctgggagccaccctctgtgacctccggcaagattatcgagtactccgtgtacctggccatccagagctcacaggctgggggcgagctcaagagctccaccccggcccagctggccttcatgcgggtgtactgcgggcccagcccctcctgcctggtgcagtcctccagcctttccaacgcccacatcgactacaccaccaagcccgccatcatcttccgcatcgccgcccgcaatgagaagggctatggcccggccacacaagtgaggtggctgcaggaaaccagtaaagacagctctggcaccaagccagccaacaagcggcccatgtcctctccagaaatgaaatctgctccaaagaaatctaaggccgatggtcagtgagaggaagctgactagcccctggattcttctccagacccccctgcttcaggaacacccgccagggcccacccctcccaccccgtcccagcattcgcacttcaccctcgcgagccgctgttcactcctctcccctttctctttctctctgtttttaaaataatctaaagaaagcacattttaccattgctgttgggaggaagcagaggcagatgggaaagcagagagaggagcgcgcttcctttcctccccgctgccgcccaccctggggagagacttttgcggggagggaaggcggagctgaggacagccagctccgccctcccaaggctgtgcgttcctgagggccaggtcgggggcaggcatggaggggaggaaaggcgtccctcttggccctccccagagtggctttcctggcaccctggcctgggtgtctggttctgttttcttttcttccccttgtgtttccagtcacctaacttcccttcctcaggctcccccggcccaccctgctcagtgaccccacaggaagcttacacattttctcagaggcctttgtgctcccacctcttctaccctccccctcttctttcccattttaaaaaagaaaagaaggaaaaagaaaaaaggggcaaggagccccgcggcggcctgggcagcgcctgtgcagacctccctgcaggccgcactgccaactgctgcatttgttgtgttttttaggttgcaattggtgaagttcacactttcattgtaattttagcgtgtggggttttgtcccttttttgttgttgttagctgtgtacagaatgtgtaatcttttttcttttctcttttttttgttttgttttgttttgtttttgtttttttacttttttcttcttggctaattcttggcagggatctttctggaggaaaagctggggccagccagggcaggagaggtgtgaaatctgccacgaggggcctgctgtttgccacccagcccaacttcctgttgctggcccctgccctctgcccttttgcctgtcctcaggccgctggaacaaaggaaggacagctcattcctcatgggcgatcactccgcatctatagggtcgagcctaggggagcttgagggagggctggggcctccttgtcctggatttccagctctccccatgccccctccctgagcaccaccggcaccgcctcccaaacagggctgctggtttccgcagccactgctccacctcccccaaatcgtcatggaaagggtggagaatggaggggaaccaggcgtccttggaggcagcttgggagggtgactgtgtagtgtcacccacaagggaggctagggcaatggagcaggccaccagcagcagctgtgcagcatggaactcaggccaggctccgaggctgggggatctgcttggagttttctgccccccaccccaaacttctgtcgaggagcaaggcttgccagcaagtcagaaggatttgaaccgagcagccaatctttccagccctcccctaccgacctctgcctggagacgcagcagcctgtgtcctccagggcctctggtttgttgtattatagtatatttcgctgtggaaaatgtcacgtttagtcaccttggagcccactcacctggtcctgttgttttaccccatcccttctctcgcgcgcctattgatttgtttctgaggagagtacaccgttcactattgtagagtaacccctgtgactcaatattaccatagtgcgatgtcgttttgtgctattttgaacaattaaaagactttttttgaaataaaaaaaaaaaa

SEQ ID NO: 2424 - DNA, 838 bp, Homo sapiens
gggtcacagcaccctcctgaaaactgcagcttccttctcaccttgaagaataatcctagaaaactcacaaaatgtgtgatgcttttgtaggtacctggaaacttgtctccagtgaaaactttgatgattatatgaaagaagtaggagtgggctttgccaccaggaaagtggctggcatggccaaacctaacatgatcatcagtgtgaatggggatgtgatcaccattaaatctgaaagtacctttaaaaatactgagatttccttcatactgggccaggaatttgacgaagtcactgcagatgacaggaaagtcaagagcaccataaccttagatgggggtgtcctggtacatgtgcagaaatgggatggaaaatcaaccaccataaagagaaaacgagaggatgataaactggtggtggaatgcgtcatgaaaggcgtcacttccacgagagtttatgagagagcataagccaagggacgttgacctggactgaagttcgcattgaactctacaacattctgtgggatatattgttcaaaaagatattgttgttttccatgatttagcaagcaactaattttctcccaagctgattttattcaatatggttacgttggttaaataaactttttttagatttagaaggtgatgtaatgatgtattcattgtgcttatgatgtattcttagtcataactgagtgaaggaaatgggaaatttgcattatttctttgttctgatatgaataataacatatttcataataattcaaggtaaaaagggatatctatggatttccctaggtaggagataacaagtatgtaccattactgaatat

SEQ ID NO: 2425 - DNA, 3145 bp, Homo sapiens; identical to SEQ ID NO: 2226

SEQ ID NO: 2426 - DNA, 374 bp, Homo sapiens; identical to SEQ ID NO: 1500

SEQ ID NO: 2427 - DNA, 7555 bp, Homo sapiens
ggggaggggaggagcgggatttgcggagcgccgcgccgctgccgggagccggcaggcccgagagtgaccggagtcacggcgggcgccggcggagctgcggcgtcggacccgcctcctggaggagctcagccccgaccaggcccggccccattcccgccccgcgccgcctccccgccgccgccgccgccgccgccgcgggagcgctcccctgcccaccccgcccccgcggccgagcccgggagtcgagtgggagtcggccggccggcgcgggcagcgccgggaccccgcgggggacactgcagccggagcccgggaggggccgcgccgccaccgtctgaactaggatgtcccgacatgaaggtgtcagctgtgatgcatgtttaaaaggaaattttcgaggtcgcagatataagtgtttaatttgctacgattacgatctttgtgcatcttgttatgaaagtggtgcaacaacaacaaggcatacaactgaccacccaatgcagtgcatattaacaagggtagattttgatttatactatggtggggaagctttctctgtagagcagccacagtcttttacttgtccctattgtggaaaaatgggctatacggagacatctcttcaagaacatgttacttctgaacatgcagaaacatcaacagaagtgatttgtccaatatgtgcagcgttacctggaggcgatcctaatcatgtcacggatgactttgcagctcatcttacacttgaacacagagcccctagagatttagatgaatcgagtggtgttcgacatgtacgtagaatgtttcaccctggccggggattaggaggtcctcgtgctcgtagatcaaacatgcactttactagcagttctactggtggactttcttcttctcagagttcatattctccaagcaatagggaagccatggatcctatagctgagcttttatctcagttatcaggagtgagacgttctgcaggaggacagcttaattcctctggcccttccgcttctcagttacaacaactgcagatgcagctgcagctagaacggcagcatgcccaggcagcacggcaacaactggagaccgcacgcaacgcaacccggcgtactaacacaagcagtgtcaccactacaatcacacaatccacagcaacaaccaacatagctaatacagaaagcagtcagcagactctacagaattcccagtttcttttaacaaggttgaatgatcctaaaatgtctgaaacggagcgccagtccatggaaagcgagcgtgcagaccgcagcctgtttgtccaagagctccttctgtccactttagtgcgtgaagagagctcatcctcagatgaggatgatcggggggagatggcagattttggtgctatgggctgtgtagatattatgcctttagatgttgctttagaaaacctaaatttaaaagagagtaataaaggaaatgagcctccaccacctcctctttgatgacatcccaattcgcagacaatgtcctctgtgctgtatttgccaatgaaagtggacaacaactatcttgggtttgtttggtgattgtaatttcaggtctgtcactcttgttacattgtgtacattcaaaaggaagagagaaaatatatatgataatcatttccacttaactaatttttacttctagcaggtaaatgtaggtagcagtgcaggggtgatctctgcttcctgtaccttgacatgcaaaaggctctcctaatactccacattcaaactgaagaggaaaattgaaatctctaatgaagctgctgtgtgtatttatgaatattaatgaataaaaactgcttggatggtttaccttaactactgcatgaggttttttgcagcgtgcatgagttttagtgaccttgttatttaagaagttaaatacaaggagtaaaacttaaaaaaaaaatacaaagcccaaagctttcccaaacattattcaatggttacacgacgaagtagcttttgaataatgtctgcctgaatcacctttctttgtgtgcctcctacgcacaaagccagctctgcagtggaatctggggattatagccgggtgtggcactccgccctgtgtgactgtcctgtcgccctgttagtcatcttgcctgtgtggagctcagcctgtctctttaactcatctgtagaagacacaccagtaaagctactgttggaatctgctgcaggggcctttgtgtgccctaaaaacaaatcctgttcatgtttgtttaaagtttttactttttgtggttgtttaaaattttttcaattgttaaatatgttttattcaggtgtagatgaatttcatttattgactgttcaacagagttaacctgaattatgttgtctttgtttttaaaaatctcacattctcaatcatattttgcattatttatgtatttgctttgtagtttgctgagacagatcagtatcaggggagctttgaggatttgccttcccagatttgtcagtatattacaaccaaattcttaatgctaattttagcaccttttatttattgggttttttctggcataaaaagtaaagccttttaattgaatcatgccacctatatgcctatattattaatcctatgtgtaaaaaaaatgtacagctttttttgggtttgttttggggtttggaagggccgggttattttttatttcctgtttcagtttttgtgcatagactttcacaatagctccaaggcagggacagcgggtttgggggttgggagggcagtttttggaatgtaaatttaggacttttaaaaaggtgcgcacagcttctgataaatttataactagacttaacctaatcatgtctcgttccagttctcttttctctgagcccttttcaaagtctcctctctttctcctgtcatccttttcctttcctgtccgtgtatctccgtttcttcaacatgacaagcatacagacttgaacacccctccggtgttcttccgagaactgtgaagtccatgttcatccaaatgtaaccaaaaaagaagtcaccctacatgtctgaaaaactgttgcttctcctctgaaacttcaaactccaacgatttccaaatacaatagctttgttttctttagttctgtaatggataatgtttaaaggaaaactttacaccaggcttctggttacactagaagtcaagcccattagggattttcattttttttcatttggttgttgagaagtttcaaaaatcagttttcaagctgtggtctttcaaacacatctgcacataagtcacacatttcaataaagcattttcaagactgttgaccacttgaatttctttggtgttagtggattaacctaaccattactctgagattttatatctctaatccagtattttttttctttttatgctaaacatgggagatcctggttttgtgtgaatgcattattttggatgtgagaaataaatgccaattatatgtactttcccttttctgcacaaattctgggaaaatgtaaaagccttcattttttaacatggttttagggaacaactgtaagtccattcagagcagtttaatttagatgatcacttttaacactgcagaagacctaaggagtcataagattccatctcatgtagaatactgtatattaattattttttaccagatattttacaaatacctcacctcatcctgtatgtaatcaataatgtattattttagggtagaacgacacagaatatcaatataaaaatatattcaagcccttgaaattcttgtgtcctttttctttagtttctgaatgaaaatcttattactggatgtactattgaataaaaattaattgcaaagactttgatggagacaaaatcaaaatataccactgtttattttggcagcaccttcaaatttctaaggaccagatcctgaattttgagaattttttgtttcgttgagttttgagtgtctaggatataagtttataaatgttctacagtgcttgtctttacttcctgtttagaaatcatttaaatctttcccctcgaggtgctctggaagaagtttaatttcagctctgaacaagtagaaataactgtgcttccttgtatggctgcaatcataagacagaatttctgtggttggctaccgtgaaatctttgtatttatattgcattgttttgttaaaaaaaaaaaaatccacagaagtagaacctaggtttgctactaacaaagtagtggattcttataattaggctcaggtaaagtaagagaaaacttctctccctgtggcccccagagaaatgaagtaggatagcagattacactattagaaataatagacgtaacaaaaaaaatccagcccattatccccaccccccattttccctctcaatattagaaatttcaataatatgctgacagattttcaaaggtcaccaaggcttttgtgtttttttccggtctgtgggccacagttaaaagaacgggtaacaggttcagagttctcttgatacgtccaagccttagtttccaggaaaaaagctaggctcctcactgcaaatattaacgctttatatatttactccatggatgttggggtaagcacatatatcaatagttcatagctctagttaaggacaaagtgggttggggggtagaaggagaatactagagaggttacggtagcaggtggctgcagaaaagaatcttttgaatgggattcctgtaacagtgttcagtaccaatattaagtctactgtaagtggggtctgatatggcttactgatacaggcatgtgtaaaaaactaagtgtgatggaggaatgggtgctaaaagctcttaacagttttgtagagaagccctgcagccgtgtttactatatatgacatgcctgtttcttagtttgcatgcacagtttaaggggcacatgcaatattggtttcatgtgcagtaaaaattaaaacacggctgagcgtggtggctcacgcctgtaatcccagcactttgcgaggccgaggcgggtggatcacgaggtcgagtttgagaccattttggccagcatagtgaaaccccatctctactaaaaaatacaaaaagttagctgggcatggtggcaggcacctgtaatcccagctactcgggaggctgaggcaggagaatcgcttgaacctgggaggcagaggttgcagtgagctgagatcacgccgccattgcactccagcccgggcgacggtgcaagactctgtctcaaaaaaaaaaaaaattaaaacactaggtacgaaattatcccagaattatacgcgaaagttggtgttcatgctggaaaacagttacggttatctgtgctctttctaaagctcaactagacactaaaacagttctctccttgagaccggaagtgggatgggggtgggcaggtggaagggaagaggctggggaggagcctctcatctcatctcatttcagcctcaacagtaattgaaaccctatgcctggcctggagtgggtagaggttagggttagagtgcaggatggagcagcagtctgcagactttcaggttgtgacgatgtcatgaaattctgtgctattaaacatggctatgtctgagtcagtcattacggtattccaaagccaaattcaagtgactgtttttctgaatagtataaaaatctaattccctgtgcttatcggcttcaactgtgcttacacaacgtttgtttctaattcgtactcttgcctcttggtttctgtagtttttcaacccatttctgtcagtgttctataaatgcatacattcgttatttaaggaaccctgcagcagacctcgaataaaatgtgacttgatgtttgttgccacttcctcaacttggttagcaaattcaagttttgaaagacgattcgtctcagagaagttgatcctgaacctccacgtcacattttagtcggttgctattaggtgggtaatgcctaataacatgggttcctcaaatcacaaaggagaatgctctcaagtcctcatgttaactttagtaagtcagttaactttacagcaactaaagagatcaattaaaaagaacccttaagtctgactgtcccaggtaactttacttgctgtacagatagtgcacagatatggatgagggctgcacatggctgatttgaaaacccatgtggggccgggtgtggtggctcacgcctgtaatcccagcactttgggaggccaaggcgggtggatcacgaggttagttcaggaccagcctggccaagatggtgaaaccccatctctactaaaaatacgaaaattagctgggcttggtggcagatgcctgtaattcctgctactcgggaggctgaggcagagaattgcttgaacccgggaggcggaggttgcagtgagccgagattgcgccactgcactccagcctgggcgacacagtgagactctcctcaaaacaaaaaaaaaagaaagaaaacccatgtgggccgcatgtgcacagcctggggctgctttccacaggcctggataatgatgtttctcttcaaggaggcctttactaaccacagggaacctagcatctgactgtgtccttggcagacagtgcatgtagcctgtagaatgttggctcctctgtctatagaaaccatcagttcgctgctctctcattcatacatactttttgagttcccagtaggtacgaagctttgtctaaacattatttaccaactgcgatttttacagacttcccctgtaagaattttctaaaagagcctttctcccttacacaattgaaacgttttcaaaggtcatcaagccggttgcgtttggtcagtcacgtgaccaatcagagctggtgagtgagctgctcccttaaatctaccaaattagactgacagcatttggaatctgcctcacacataagagatccatattcatttaatagtgaagccagcccagaagcatcctcttctgtaagctggatggagtcccagctctctctccttgtatataaggagaccacaccctgtatataaggttttcttgaggtagatgcagcaatattcctggggtaagattctataatactcctgtattggcaagtggactggaccaacagacacaggcctcagccactgtcgctagggactgaaggagagttcatggattcttaccccctagtcatgaaagctattctggccagccttgaatccatttaattttgcccacgagaacctttcatgacaattaacaagacactagtttccccataaaagtccatttttaaatatatagtatgctaattagcagtgtctgttgaattgccctatcggatagcagccaccatgtgtgctgaccactcacgattcagacttaccttggaaaatatcacactgacgatacagtactttagaataaattgcatattgtatcaggctccgagactaatttgtactgaacccttgatatagattaccttttataacatcaccacctgtcatgaagcttatctgttttctgatttgaataaactttgtgttgtgcaaa

SEQ ID NO: 2428 - DNA, 4932 bp, Homo sapiens
caaagcccgtggggcagctgggtctggggaaaacagcccggggccgcgggggccgaacgagcacggaccggaagttccgcagccgcgccgtccggcggagccgttggctgcggacgccggaagtggccagtcggcaggtctgaggcggcgctgtgtgtgtgaagcgtacctagggcgggaggcgacatggagacaggggcggccgagctgtatgaccaggcccttttgggcatcctgcagcacgtgggcaacgtccaggatttcctgcgcgttctctttggcttcctctaccgcaagacagacttctatcgcttgctgcgccacccatcggaccgcatgggcttcccgcccggggccgcgcaggccttggtgctgcaggtattcaaaacctttgaccacatggcccgtcaggatgatgagaagagaaggcaggaacttgaagagaaaatcagaagaaaggaagaggaagaggccaagactgtgtcagctgctgcagctgagaaggagccagtcccagttccagtccaggaaatagagattgactccaccacagaattggatgggcatcaggaagtagagaaagtgcagcctccaggccctgtgaaggaaatggcccatggttcacaggaggcagaagctccaggagcagttgctggtgctgctgaagtccctagggaaccaccaattcttcccaggattcaggagcagttccagaaaaatcccgacagttacaatggtgctgtccgagagaactacacctggtcacaggactatactgacctggaggtcagggtgccagtacccaagcacgtggtgaagggaaagcaggtctcagtggcccttagcagcagctccattcgtgtggccatgctggaggaaaatggggagcgcgtcctcatggaagggaagctcacccacaagatcaacactgagagttctctctggagtctcgagcccgggaagtgcgttttggtgaacctgagcaaggtgggcgagtattggtggaacgccatcctggagggagaagagcccatcgacattgacaagatcaacaaggagcgctccatggccaccgtggatgaggaggaacaggcggtgttggacaggcttacctttgactaccaccagaagctgcagggcaagccacagagccatgagctgaaagtccatgagatgctgaagaaggggtgggatgctgaaggttctcccttccgaggccagcgattcgaccctgccatgttcaacatctccccgggggctgtgcagttttaatgaccagaaggaaaggaaaccctcgccggtggggaggcagagccttatcctcggctgcccttcttggctccctgcattccagggacttgctcgtcttgtttacccctagccatcctttctttcaagggtgaaccaggccttccaccctgaccttgcatctccagactgttccagagaaggtgcggggccagctgctatgtggtggccgctgtggctgacactgagtgaaggtgtttgaaatgcaggagaggatatcccagcaaattgggatcacatgcttttgtctccacagcaaccagccactgcaggcagcatgtctttcctcccctgctctctgcttgctgttgttttgacgctattctgcttgcatgtcttctggttgggatgtggagttgttgctggactctcaggcgaagctgaagtcattgaagtgtgtgaagctctgtgcttgcatgagggcaagcaaggaatggctgtgcctgaggctgctctgggaaactccttgccccttgacctcttttgagagcattcacgtggtcttcttgctcatccccttataaatgtgctttgcctgcctcagcctcatggtcagagcagtggagactggagccctgtttgcacgttctagttgttcggagaaagcctaggttctgggctcaggtccagatgcagcggggattctgttctctgactgtggcgaccttgctttggttcttgttgaagtgaaccaagcccggccaccacgcatggcatgctgtgcttggctccccataagacgtcctctttgggtgcacggtgtcaaagtgtgggcaggagtggagagctggtgccctcaggaggagaccacagcatgtccatcagctcagcagagctcgacagccacaagtcctgagaagctttgaccttgaagggcttctgggagaggaggaatttctgcatggggcgtgaaggcacactgtcccaccacaactgaaccagaagagagtgaagactcccctcttcccatcctctgtgccaggtgccagactgtgctccttggaacttatggcccaatcttacctgttctccagggactggtcactgcctcaggacccccaagcctatgccctgagccatggctgctgactgactccagccaaggtgcaaagacgagattatgagacaggtcctcaggcctgtgttccaagtactcacaggggctctgggtgcccatcgccgggagtatggttcagctgccaccggcactgtccatttgcctgtctgtcaagctcagagcatggataagccacacagcagggcagtgcaccctggcaccatgcacggccagcaagaatcaaggcccgcagatgctaagagggcctattgtcaggggaaggtccccgctcctgcacactctctatggatacttgggttgtgggggctctcttggagagtaagtttgtggtttgtttctggtttacagtggtggctgacaccccttgtaagaaagcattcctgggaagtcttctgtgggtccaaacatgttgctccgatcatcacaggagagcaaaaggccctagataccccctttggaatgtgagagtcttgttgtctgatatttgccactgagctggtgaagcccctctaaagagatctcgaccctggggagcagaattcttgtcatctatgaggggtcctgagaaagacttgtcattttttttcctggagttcttcccattgaggtcctaggatttgcacaccactgtcccacaagagctttcctgcctaatgaaaggaggtcttgtggtgtgtgtctcctctcttctctatagttcccgagttggcccccattgcagcccccaccctgtgggtagtcttccagaagtgatgcagtggtgtgagatgccctacaccttgttatttgggagactttgagagtcattcacttccatggtgactagtgtttgttttgcctgattttatattctgtgttgcatttctccccactccctgccctgctttaataaacagcaaaccaatatctaggaagaatgactgagggatagtattgggtattggccccatggcaggaacagccacttgcatctggtcccggtgccacactgcggtgcttggtgtggttgtggagcctgtccctgcgcgccttgctcccgttgagccacgctgtctggtgggtgattctctgccctgagccaccaccctggactggcccagtctccagagctggcacaccctgcctgttttctctttttagacacaacagccgcagtttggccagccactaagtcccaccagctgaggtccgaggaaagcggggtgactcatttcccttgtccagggcccgaggagagtgaggtgtccagcctgcaaagctattccagctccttggtgttggtttgcaataaattggtatttaagcagttctgggtctgcgtgtgacatttgctgctgagacagttctgtctgtgcatggtcattattgttgcattctagccttgaggtcccaggccaacgtacacagcaaacaccagcatggggaattcttaggggttgtttcccatctggtctgaatgcactgggcaagatctcaatacagctttagaaatcctgtaagattttgaccagtggggagaaaaagaatgtagctatagatcttacatcctttcaaacaggttctggaattctgtagttactggaaagcttagggtgagtgcagagttgggaatgattccactgaagggccacctttgcccaccaggctccaaggccctccttggtctccaggtgcatacctgctgttaactttgctgagccctcgcaatgggcttcctccaggacataacgccgtgtctgacacagaagtctcccaggtggctggccacctgcttcttcctcagtcagatctttgactctccttctctgtgcccaccccatctccagcctcctctgaccctgctcacccctggggacaggacctaggggtgtgagaagtacttggctgaataaagactgtttcaaaggcaatccttagaattgcctagcatactcccagggccagaaataacccgccagaaaggagaggcgtatttgcccctgaagagtgcaggagggagaacagttgagaagtgttttgtgtggaaatgtgtccaagaggcgtcagctgctgcacagagaactcactgcccagaacactgcgcttggggaacagacctcacccccacctcaaatctgctctccactgggcctgttggcagccagctcagctggggaagggacagcatgactcgctttgtcgatgaaaagcacgaagttgtcagcacagaacctggccagtccttgagaaactccctccttggtggtcagaggtcaagcagcccatgtggcccacggtcctgaagaactgggctatgtccctgaggctcctctctaccgtctgactgtggggtctggggaacaggcatttaaaccaggctgctgccctggggagtgcccactggacgccagggtgccccatagggacagggtcacaaagccctggggcttcccctgccagtcctggtgaggacagtgtggtcactatctcagagagacgaaaaatgaatattctgtcatttcagactaaactactcacccagctcacactaaaaaaaaaaaaaaaaa

SEQ ID NO: 2429 - DNA, 3536 bp, Homo sapiens
agcgccggcgaggcgcgggaggaggagaagcagtggggaggcgcagccgctcacctgcggggcagggcgcggaggagggacccgggctgcgcgctctcgggccgaggaaccaggacgcgcccggagcctcgcacgcggccaagctcggggcgtcccctcccctcggccgggcgaactcaaggggcgcagctctttgctttgacagagctggccggcggaggcgtgcagagcggcgagccggcgagccaggctgagaaactcgagccgggaacaaagaggggtcggactgagtgtgtgtgtcggctcgagctccgggcagaggcatttgggcccgaggcccccgctgtgactccccgagactccgcagtgccctccactgcggagtccccgcgcttgccggcaaaaactttattcttggcaaacttctctttctcttcccctcctcctcggcccccatcttctgctcctcctccttctctagcagattaaatgagcctcgagaagaaaaaccgaagcgaaagggaagaaaataagaagatctaaaacggacatctccagcgtgggtggctcctttttctttttctttttttcccacccttcaggaagtggacgtttcgttatcttctgatccttgcaccttcttttggggcaaacggggcccttctgcccagatcccctctcttttctcggaaaacaaactactaagtcggcatccggggtaactacagtggagagggtttccgcggagacgcgccgccggaccctcctctgcactttggggaggcgtgctccctccagaaccggcgttctccgcgcgcaaatcccggcgacgcggggtcgcggggtggccgccggggcagcctcgtctagcgcgcgccgcgcagacgcccccggagtcgccagctaccgcagccctcgccgcccagtgcccttcggcctcgggggcgggcgcctgcgtcggtctccgcgaagcgggaaagcgcggcggccgccgggattcgggcgccgcggcagctgctccggctgccggccggcggccccgcgctcgcccgccccgcttccgcccgctgtcctgctgcacgaacccttccaactctcctttcctcccccacccttgagttacccctctgtctttcctgctgttgcgcgggtgctcccacagcggagcggagattacagagccgccgggatgccccaactctccggaggaggtggcggcggcgggggggacccggaactctgcgccacggacgagatgatccccttcaaggacgagggcgatcctcagaaggaaaagatcttcgccgagatcagtcatcccgaagaggaaggcgatttagctgacatcaagtcttccttggtgaacgagtctgaaatcatcccggccagcaacggacacgaggtggccagacaagcacaaacctctcaggagccctaccacgacaaggccagagaacaccccgatgacggaaagcatccagatggaggcctctacaacaagggaccctcctactcgagttattccgggtacataatgatgccaaatatgaataacgacccatacatgtcaaatggatctctttctccacccatcccgagaacatcaaataaagtgcccgtggtgcagccatcccatgcggtccatcctctcacccccctcatcacttacagtgacgagcacttttctccaggatcacacccgtcacacatcccatcagatgtcaactccaaacaaggcatgtccagacatcctccagctcctgatatccctactttttatcccttgtctccgggtggtgttggacagatcaccccacctcttggctggttttcccatcatatgattcccggtcctcctggtccccacacaactggcatccctcatccagctattgtaacacctcaggtcaaacaggaacatccccacactgacagtgacctaatgcacgtgaagcctcagcatgaacagagaaaggagcaggagccaaaaagacctcacattaagaagcctctgaatgcttttatgttatacatgaaagaaatgagagcgaatgtcgttgctgagtgtactctaaaagaaagtgcagctatcaaccagattcttggcagaaggtggcatgccctctcccgtgaagagcaggctaaatattatgaattagcacggaaagaaagacagctacatatgcagctttatccaggctggtctgcaagagacaattatggtaagaaaaagaagaggaagagagagaaactacaggaatctgcatcaggtacaggtccaagaatgacagctgcctacatctgaaacatggtggaaaacgaagctcattcccaacgtgcaaagccaaggcagcgaccccaggacctcttctggagatggaagcttgttgaaaacccagactgtctccacggcctgcccagtcgaccccaaaggaacactgacatcaattttaccctgaggtcactgctagagacgctgatccataaagacaatcactgccaacccctctttcgtctactgcaagagccaagttccaaaataaagcataaaaaggttttttaaaaggaaatgtaaaagcacatgagaatgctagcaggctgtggggcagctgagcagcttttctcccctcatatctgcgtgcacttcccagagcatcttgcatccaaacctgtaacctttcggcaaggacggtaacttggctgcatttgcctgtcatgcgcaactggagccagcaaccagcacatccatcagcaccccagtggaggagttcatggaagagttccctctttgtttctgcttcatttttctttcttttcttttctcctaaagcttttatttaacagtgcaaaaggatcgtttttttttgcttttttaaacttgaatttttttaatttacactttttagttttaattttcttgtatattttgctagctatgagcttttaaataaaattgaaagttctggaaaagtttgaaataatgacataaaaagaagccttctttttctgagacagcttgtctggtaagtggcttctctgtgaattgcctgtaacacatagtggcttctccgcccttgtaaggtgttcagtagagctaaataaatgtaatagccaaacccactctgttggtagcaattggcagccctatttcagtttattttttcttctgttttcttcttttctttttttaaacagtaaaccttaacagatgcgttcagcagactggtttgcagtgaattttcatttctttccttatcacccccttgttgtaaaaagcccagcacttgaattgttattactttaaatgttctgtatttgtatctgtttttattagccaattagtgggattttatgccagttgttaaaatgagcattgatgtacccattttttaaaaaagcaaggcacagcctttgcccaaaactgtcatcctaacgtttgtcattccagtttgagttaatgtgctgagcatttttttaaaagaagctttgtaataaaacatttttaaaaattgtcatttaaaaaaaaaaaaaaaaaa

SEQ ID NO: 2430 - DNA, 648 bp, Homo sapiens
ctttccggacctggccgagcaggaggcgccatcatgggagtggacatccgccataacaaggaccgaaaggttcggcgcaaggagcccaagagccaggatatctacctgaggctgttggtcaagttatacaggtttctggccagaagaaccaactccacattcaaccaggttgtgttgaagaggttgtttatgagtcgcaccaaccggccgcctctgtccctttcccggatgatccggaagatgaagcttcctggccgggaaaacaagacggccgtggttgtggggaccataactgatgatgtgcgggttcaggaggtacccaaactgaaggtatgtgcactgcgcgtgaccagccgggcccgcagccgcatcctcagggcagggggcaagatcctcactttcgaccagctggccctggactcccctaagggctgtggcactgtcctgctctccggtcctcgcaagggccgagaggtgtaccggcatttcggcaaggccccaggaaccccgcacagccacaccaaaccctacgtccgctccaagggccggaagttcgagcgtgccagaggccgacgggccagccgaggctacaaaaactaaccctggatcctactctcttattaaaaagatttttgctgacaaaaaaaa

SEQ ID NO: 2431 - DNA, 3120 bp, Homo sapiens
gggcggggcgtgtgcggactgagcgctctgcttccggggcgcgggtgacgcgacgacggcgacactttgctacggagtgcatcggacgtcgaagcctagagtctctgcgtctttccctcttccgctgcctcattcctttccttcctagccttggtcgtcgccgccaccatgaacaagaagaagaaaccgttcctagggatgcccgcgcccctcggctacgtgccggggctgggccggggcgccactggcttcaccacgcggtcagacattgggcccgcccgtgatgcaaatgaccctgtggatgatcgccatgcacccccaggcaagagaaccgttggggaccagatgaagaaaaatcaggctgctgacgatgacgacgaggatctaaatgacaccaattacgatgagtttaatggctatgctgggagcctcttctcaagtggaccctacgagaaagatgatgaggaagcagatgctatctatgcagccctggataaaaggatggatgaaagaagaaaagaaagacgggagcaaagggagaaagaagaaatagagaaatatcgtatggaacgccccaaaatccaacagcagttctcagacctcaagaggaagttggcagaagtcacagaagaagagtggctgagcatccccgaggttggcgatgccagaaataaacgtcagcggaacccacgctatgagaagctgacccctgttcctgacagtttctttgccaaacatttacagaccggagagaaccatacctcagtggatccccgacaaactcaatttggaggtcttaacacaccctatccaggtggactaaacactccatacccaggtggaatgacgccaggactgatgacacctggcacaggtgagctggacatgaggaagattggccaagcgaggaacactctgatggacatgaggctgagccaggtgtctgactccgtgagtggacagaccgtcgttgaccccaaaggctacctgacggatttaaattccatgatcccgacacacggaggagacatcaatgatatcaagaaggcgcgactgctcctcaagtctgttcgggagacgaaccctcatcacccgccagcctggattgcatcagcccgcctggaagaagtcactgggaagctacaagtagctcggaaccttatcatgaaggggacggagatgtgccccaagagtgaagatgtctggctggaagcagccaggttgcagcctggggacacagccaaggccgtggtagcccaagctgtccgtcatctcccacagtctgtcaggatttacatcagagccgcagagctggaaacggacattcgtgcaaagaagcgggttcttcggaaagccctcgagcatgttccaaactcggttcgcttgtggaaagcagccgttgagctggaagaacctgaagatgctagaatcatgctgagccgagctgtggagtgctgccccaccagcgtggagctctggcttgctctggcaaggctggagacctatgaaaatgcccgcaaggtcttgaacaaggcgcgggagaacattcctacagaccgacatatctggatcacggctgctaagctggaggaagccaatgggaacacgcagatggtggagaagatcatcgaccgagccatcacctcgctgcgggccaacggtgtggagatcaaccgtgagcagtggatccaggatgccgaggaatgtgacagggctgggagtgtggccacctgccaggccgtcatgcgtgccgtgattgggattgggattgaggaggaagatcggaagcatacctggatggaggatgctgacagttgtgtagcccacaatgccctggagtgtgcacgagccatctacgcctacgccctgcaggtgttccccagcaagaagagtgtgtggctgcgcgccgcgtacttcgagaagaaccatggcactcgggagtccctggaagcactcctgcagagggctgtggcccactgccccaaagcagaggtgctgtggctcatgggcgccaagtccaagtggctggcaggggatgtgcctgcagcaaggagcatcctggccctggccttccaggccaaccccaacagtgaggagatctggctggcagccgtgaagctggagtccgagaatgatgagtacgagcgggcccggaggctgctggccaaggcgcggagcagtgcccccaccgcccgggtgttcatgaagtctgtgaagctggagtgggtgcaagacaacatcagggcagcccaagatctgtgcgaggaggccctgcggcactatgaggacttccccaagctgtggatgatgaaggggcagatcgaggagcagaaggagatgatggagaaggcgcgggaagcctataaccaggggttgaagaagtgtccccactccacacccctgtggcttttgctctctcggctggaggagaagattgggcagcttactcgagcacgggccattttggaaaagtctcgtctgaagaacccaaagaaccctgggctgtggttggagtccgtgcggctggagtaccgtgcggggctgaagaacatcgcaaatacactcatggccaaggcgctgcaggagtgccccaactccggtatcctgtggtctgaggccatcttcctcgaggcaaggccccagaggaggaccaagagcgtggatgccctgaagaagtgtgagcatgacccccatgtgctcctggccgtggccaagctgttttggagtcagcggaagatcaccaaggccagggagtggttccaccgcactgtgaagattgactcggacctgggggatgcctgggccttcttctacaagtttgagctgcagcatggcactgaggagcagcaggaggaggtgaggaagcgctgtgagagtgcagagcctcggcatggggagctgtggtgcgccgtgtccaaggacatcgccaactggcagaagaagatcggggacatccttaggctggtggccggccgcatcaagaacaccttctgattgagcggttgccatggccggtctccgtggggcagggttgggccgcatgtggaagggctctgagctgtgtcctccttcattaaaagtttttatgtctcgtgtcagaaaaaaaaaaaaaaaaaaaaa

SEQ ID NO: 2432 - DNA, 3138 bp, Homo sapiens; identical to SEQ ID NO: 2013

SEQ ID NO: 2433 - DNA, 7299 bp, Homo sapiens
ctccgctgcctgagtcctcggcgaacatggcggcccccgagtcagggccggctttgagtccaggcactgcagagggtgaggaggagacgattctctatgacttgttggtcaacaccgagtggccaccggagactgaagtacagcctagaggcaaccaaaaacatggtgcatcctttatcatcacgaaagcaattcgagatcgtttattatttttacgccaatacatctggtacagcccggcaccttttttgctccctgatggactggttcgcttggttaataaacagataaactggcatttggtacttgcaagcaatggaaagcttttggctgctgttcaagatcagtgtgtggaaatcaggtctgcaaaagatgattttacatccattattgggaaatgtcaagttccgaaagacccgaaaccccagtggagacgggtagcatggagttacgattgtaccctactggcctatgccgaaagcacaggaactgtgagggtgtttgatctcatgggaagtgaactctttgtcatttccccggcatctagttttataggtgacttaagctatgccattgctgggttgatatttttagaatataaagcaagtgcacagtggtctgcagaactcctggtcatcaattaccgaggagaacttagaagttaccttgtaagtgttggaacaaatcagagctaccaagaaagtcactgtttcagcttcagtagtcattatcctcatggaatcaacacagctatttaccaccctggtcacagacttttacttgttggtggatgtgaaactgctgaagtaggcatgtcaaaagcttctagctgtggcctttctgcctggagagttctttcaggatcaccgtattataagcaggttactaatggtggagacggggttactgcagtaccgaagacactgggattattaaggatgttaagtgtcaagttttacagtcgccagggacaagaacaggatggaatttttaagatgagcctttctccagatgggatgctcctggcagccattcacttctcagggaaactgagcatctgggcgattccatctctgaagcaacaaggggaatggggtcaaaatgagcagccaggctatgatgaccttaatcctgattggaggctctctactgagaagagaaaaaaaatcaaagataaagagtccttttacccactgatagatgtcaattggtgggcagacagtgcagtgactttagctcgatgctctggtgctttaactgtttcatctgtgaaaactttgaagaatttactgggaaaatcctgtgaatggtttgaaccatcacctcaagtcactgctacccatgatgggggatttttaagtttggagtgtgagattaaacttgcccccaaacgatctcgtttggagactagagctggagaagaagatgaaggagaagaggattctgattctgattatgaaatatctgccaaggctcgctactttggttatataaaacagggcctttacttggtgactgaaatggagcgatttgcaccaccacggaaacgcccacgaaccattactaaaaactaccgccttgtgagtttgcgctccacgacaccagaggaactttatcagaggaagattgaaagtgaagagtatgaggaagccttgtccttggctcatacctacggcctggatactgaccttgtatatcagaggcagtggaggaagtcagcggtcaacgttgcttcaattcagaattatttgagtaaaataaagaagcgatcctgggttctccatgagtgtttggaaagagttcctgaaaatgtggatgctgcaaaagaactgcttcagtatggattaaaaggcacagacctggaggctcttttagcaatagggaaaggagcagatgatggcagatttacattacctggtgaaatagacattgacagtatctcctatgaagagctttcaccacctgatgaagagcctgccaagaataaaaaggaaaaggagctcaagaagagacaagaactactgaaattagtgaacttttccaagttgacactggaacaaaaggaactttgccgttgtagacggaagttattaacctacttagatcgacttgcaacatatgaggaaatcctaggagtgcctcatgcatctgaacagagatatgatgctgaattctttaagaaattcagaaatcagaatattgttctctcagcaagaacttatgctcaggaaagtaatgtacaagccctggaaattctgtttacttaccatggttccgacctgcttcctcatcgccttgcaattctgtccaactttccagagaccacttctccacatgaatattctgttttgctgcccgaagcttgttttaacggtgactccctgatgatcattccttggcatgaacataaacaccgagctaaagattggtgcgaggagttggcttgcagaatggttgttgagccgaatctccaagatgaaagtgaattcttgtatgctgcacagcctgagttactaaggttcaggatgacccagcttacggtggagaaggttatggactggtatcagaccagagcagaggaaatagagcattatgctcggcaggtggactgtgcattgtcacttattcgacttgggatggagcggaatattcctggtttgctggttctctgtgacaatttggttactctggaaacattggtttatgaagccaggtgtgatgtaactctaaccctgaaagaactccagcagatgaaagacattgaaaaactaagattactgatgaatagttgttctgaggataaatatgtgacaagtgcctaccagtggatggttccctttcttcatcgttgtgagaaacagtcgcctggtgtggctaatgagctattaaaagaatatttagtaactttagctaaaggggacttaaaatttcccctgaagatatttcagcattccaaaccagatctgcagcaaaaaattattcctgatcaggaccaactgatggcaatagcactagagtgcatctatacctgtgaacgaaatgatcaactctgtctttgctatgacctactagaatgtctgccagaaagaggatatggtgataagacagaggcaaccacaaagcttcatgacatggtagaccaactggaacaaattctcagtgtgtcagagcttttggaaaaacatggactcgagaaaccaatttcatttgttaaaaacactcaatctagctcagaagaggcacgcaagctgatggttagattgacgaggcacactggccggaagcagcctcctgtcagtgagtctcattggagaacgttgctgcaagacatgttaactatgcagcagaatgtatacacatgtctagattctgatgcctgctatgagatatttacagaaagccttctgtgctctagtcgccttgaaaacatccacctggctggacagatgatgcactgcagtgcttgttcagaaaatcctccagctggtatagcccataaagggaaaccccactacagggtcagctacgaaaagagtattgacttggttttggctgccagcagagagtacttcaattcttctaccaacctcactgatagctgcatggatctagccaggtgctgcttacaactgataacagacagaccccctgccattcaagaggagctagatcttatccaagccgttggatgtcttgaagaatttggggtaaagatcctgcctttgcaagtgcgattgtgccctgatcggatcagtctcatcaaggagtgtatttcccagtcccccacatgctataaacaatccaccaagcttctgggccttgctgagctgctgagggttgcaggtgagaacccagaagaaaggcggggacaggttctaatccttttagtggagcaggcacttcgcttccatgactacaaagcagccagtatgcattgtcaggagctgatggccacaggttatcctaaaagttgggatgtttgtagccagttaggacaatcagaaggttaccaggacttggccactcgtcaagagctcatggcttttgctttgacacattgccctcctagcagcattgaacttcttttggcagctagcagctctctgcagacagaaattctttatcaaagagtgaatttccagatccatcatgaaggaggggaaaatatcagtgcttcaccattaactagtaaagcagtacaagaggatgaagtaggtgttccaggtagcaattcagctgacctattgcgctggaccactgctaccaccatgaaagtcctttccaacaccacaaccaccaccaaagcggtgctgcaggccgtcagtgatgggcagtggtggaagaagtctttaacttaccttcgaccccttcaggggcaaaaatgtggtggtgcatatcaaatcggaactacagccaatgaagatctagagaaacaagggtgtcatcctttttatgaatctgtcatctcaaatccttttgtcgctgagtctgaagggacctatgacacctatcagcatgttccagtggaaagctttgcagaagtattgctgagaactggaaaattggcagaggctaaaaataaaggagaagtatttccaacaactgaagttctcttgcaactagcaagtgaagccttgccaaatgacatgaccttggctcttgcttaccttcttgccttaccacaagtgttagatgctaaccggtgctttgaaaagcagtccccctctgcattatctctccagctggcagcgtattactatagcctccagatctatgcccgattggccccatgtttcagggacaagtgccatcctctttacagggctgatcccaaagaactaatcaagatggtcaccaggcatgtgactcgacatgagcacgaagcctggcctgaagaccttatttcactgaccaagcagttacactgctacaatgaacgtctcctggatttcactcaggcgcagatccttcagggccttcggaagggtgtggacgtgcagcggtttactgcagatgaccagtataaaagggaaactatccttggtctggcagaaactctagaggaaagcgtctacagcattgctatttctctggcacaacgttacagtgtctcccgctgggaagtttttatgacccatttggagttcctcttcacggacagtggtttgtccacactagaaattgaaaatagagcccaagaccttcatctctttgagactttgaagactgatccagaagcctttcaccagcacatggtcaagtatatttaccctactattggtggctttgatcacgaaaggctgcagtattatttcactcttctggaaaactgtggctgtgcagatttggggaactgtgccattaaaccagaaacccacattcgactgctgaagaagtttaaggttgttgcatcaggtcttaattacaaaaagctgacagatgaaaacatgagtcctcttgaagcattggagccagttctttcaagtcaaaatatcttgtctatttccaaacttgttcccaaaatccctgaaaaggatggacagatgctttccccaagctctctgtacaccatctggttacagaagttgttctggactggagaccctcatctcattaaacaagtcccaggctcttcaccggagtggcttcatgcctatgatgtctgcatgaagtactttgatcgtctccacccaggtgacctcatcactgtggtagatgcagttacattttctccaaaagctgtgaccaagctgtctgtggaagcccgtaaagagatgactagaaaggctattaagacagtcaaacattttattgagaagccaaggaaaagaaactcagaagacgaagctcaagaagctaaggattctaaagttacctatgcagatactttgaatcatctggagaaatcacttgcccacctggaaaccctgagccacagcttcatcctttctctgaagaatagtgagcaggaaacactgcaaaaatacagtcacctctatgatctgtcccgatcagaaaaagagaaacttcatgatgaagctgtggctatttgtttagatggtcagcctctagcaatgattcagcagctgctagaggtggcagttggccctcttgacatctcacccaaggatatagtgcagagtgcaatcatgaaaataatttctgcattgagtggtggcagtgctgaccttggtgggccaagggacccactgaaggtcctggaaggtgttgttgcagcagtccacgccagtgtggacaagggtgaggagctggtttcacctgaggacctgctggagtggctgcggcctttctgtgctgatgacgcctggccggtgcggccccgcattcacgtgctgcagattttggggcaatcatttcacctgactgaggaggacagcaagctcctcgtgttctttagaactgaagccattctcaaagcctcctggccccagagacaggtagacatagctgacattgagaatgaagagaaccgctactgtctattcatggaactcctggaatctagtcaccacgaggctgaatttcagcacttggttttacttttgcaagcttggccacctatgaaaagtgaatatgtcataaccaataatccatgggtgagactagctacagtgatgctaaccagatgtacgatggagaacaaggaaggattggggaatgaagttttgaaaatgtgtcgctctttgtataacaccaagcagatgctgcctgcagagggtgtgaaggagctgtgtctgctgctgcttaaccagtccctcctgcttccatctctgaaacttctcctcgagagccgagatgagcatctgcacgagatggcactggagcaaatcacggcagtcactacggtgaatgattccaattgtgaccaagaacttctttccctgctcctggatgccaagctgctggtgaagtgtgtctccactcccttctatccacgtattgttgaccacctcttggctagcctccagcaagggcgctgggatgcagaggagctgggcagacacctgcgggaggccggccatgaagccgaagccgggtctctccttctggccgtgagggggactcaccaggccttcagaaccttcagtacagccctccgcgcagcacagcactgggtgtgagggccacctgtggccctgctccttagcagaaaaagcatctggagttgaatgctgttcccagaagcaacatgtgtatctgccgattgttctccatggttccaacaaattgcaaataaaactgtatggaaacgatgagcaagtaaaaaaaaaaaaaatt

SEQ ID NO: 2434 - DNA, 5758 bp, Homo sapiens; identical to SEQ ID NO: 1378

SEQ ID NO: 2435 - DNA, 1589 bp, Homo sapiens
ccagtcctgccgcccggtaacaaaaccggggttcccgccacacgcacccggtagggctcaagacgctttatcggcgacaatggctggctgaatgggaggcctgaggttctgaaggaaccggggtgctggcgaccgggacctcgaggccgctgctggggaggacgctggccagcgtgcagggggcggaggcggggcgtgccgggaggctcccatctcccgccccgcacaacccgggcagggccgccgctccgccgccgccgcagatccggctctcaccctcggctcccgaggccccgcggcgcctccttctgcggactctgcgggaccctccccggcaggcgctgtgccctggagaaggcacagtggctcaggcatggccgcggggacggcggcgcggaaggcagcgccggtgctggaggcccccccgcagcaggagcagctctctcatacaaagctttctgcagaagacacatggaacctgcagcaggagaggatgtacaagatgcaccggggccacgattccatgcacgtggaaatgatcttgatcttcctctgcgttctggtcattgcccagatagtgctggttcagtggagacagaggcatggccgatcctacaatctggtgaccttgttgcagatgtgggttgtccccttatatttcacgataaaattatactggtggcggtttctgtctatgtgggggatgttctccgttattaccagttacatcctcttcagagctacccgaaaacccctctcaggaaggacaccacgattggtctacaaatggtttcttttgatctacaaactcagctatgcatttggtgttgtgggttacttggcgatcatgtttacaatgtgtggattcaatctgtttttcaaaatcaaagctagagattccatggattttggcattgtgtctttgttctacggcctctactatggagtaatggggagagactttgccgagatctgctcagactacatggcttccactatagggttctacagtgtcagccggttgcctacaaggagcttatcggacaatatctgtgcagtctgtgggcagaagatcattgtggagcttgatgaagaagggctcattgaaaacacctaccagctttcctgtaatcatgtctttcatgaattctgcatccgaggttggtgtatcgttgggaaaaagcagacttgcccttactgcaaagagaaagttgatttgaagaggatgatcagtaatccctgggagcgcacacattttctgtatggacaaatcctggattggcttcgttatttggtggcctggcaacctgtggtgataggaatagttcaaggcattaactattcactagggctggaataggacagcagaccccagaagcaacatactgcatggttgaaatccttggtccaacatttaatattaatttttttaattttagagatgatcccaagtgtttagaaaactaagtaaactttgttgtcaagcaatttgtccatgtggaaagaatttaaagagaagctgaacaatggaataaacaaataaagcatgttttttcatctttcccattaaaaaaaaaaaaaaaaaaaaa

SEQ ID NO: 2436 - DNA, 6139 bp, Homo sapiens; identical to SEQ ID NO: 1008

SEQ ID NO: 2437 - DNA, 440 bp, Homo sapiens
atacatttgtgttcatagcttccaagagatatgctgactttcatttcttgtatgtactctgcacatactcaccatatctctatctggtctttgcatggagtgaccatagctccttctctcttacattgaatgtatagaatgtagccattgtagcagcttgtgttgtcacgcttcttcttttgagcaactttcttacactgaagaaaggcagaatgagtgcttcagaatgtgatttcctactaacctgttccttggataggctttttagtatagtatttttttttgtcattttctccatcaacaaccagggagactgcacctgatggaaaagatatatgactgcttcatgacattcctaaactatcttttttttattccacatctacgtttttggtggagtcccttttgcatcattgttttaaggatgataaaaaaaaata

SEQ ID NO: 2438 - DNA, 3979 bp, Homo sapiens
gaacccgcctgtcagccagcctttcgagctaattagctcagcatacaacaaagataagtgagcctgggaagagggccccctgaggggtctttagattctgggaaatgtctgattggcagatgttaaaagggattccttggtaatccagtgcatcaatgagctgcagaaattcagcccaggactgcaagaattcaggcatgaggacactctgtacaggaggctcacacaggcagacccaagatggacagaaccttggaatctctgagacacatcattgcccaagtcttgcctcacagagatccggctctagtcttcaaagacttgaacgttgtgtcaatgttacaggaattttgggaaagcaagcagcagcagaaggctgcattcccaagtgaaggtgtggtggtctatgagtcactgccagctcctgggcctccctttgtgagttacgtgaccctcccagggggaagctgttttggcaactttcagtgctgcttaagtagagccgaggccaggcgggatgcagctaaagtggccctgatcaactccctcttcaatgagctgccctctcgcaggatcaccaaggaattcattatggaaagtgttcaggaagcagtagcctccaccagcggcaccttagatgatgcagatgaccccagcaccagtgttggggcctatcactacatgctggagtcaaacatggggaagactatgctggagtttcaggagctgatgaccattttccaactattgcactggaatggaagcctaaaagcccttcgtgaaacaaagtgttcccgacaggaagtcatctcctactattctcagtattctctagatgaaaagatgcgcagccacatggccctggactggatcatgaaggagcgggactcaccaggaattgtctctcaagagctacgaatggccctgaggcagttggaggaagccaggaaagcaggacaagaactacggttttacaaagaaaagaaagaaatattgagcttagccctgactcagatctgcagtgaccctgacacttcctcacccagtgatgatcagctgagccttacggccctgtgtggctatcactagcaaggccaagccccgggtaccctcagtgatggcagaggccagattaacattaggaatctcagtgcagaggtcctcagaggctccagcatctctagtactacctgaaggctctcctaaccctctccacacattccatttacagagtatgagagtcgtaggacccttacaagacccaacaagccactcgatgcatttttctatcacattctcaatagttccagctcaggatgaaaggatagacacaaaattgtttgaaaaacattttccaggcctggctccaacctaaagcctgactgtcacgtgccttgcttgattttatatatattgtttcaagaatagtccaatatagcattccccaaatgaacagcagccagaattaggtgaagtagcatgatagcagtgtttaaaaatacttaggattaaataaataatatggattgttttaaaaaatatccaaggatcagagtctctttctaagctttgtaagctaagcaatagtttatgtcctactagatacactgcaaactacagtggggattttatctggacatcccaccatcaaagatcttgaaatagtaatagtatgaaaatactagataaaattaatgtttaaaatgtttttgtaacaataatttttaaaacccacactcttccatatatggggataaatatcacctagaaaagtagcctcactcttattcctcaagaattaatatccaatgtttatgagtcttgcaatcaattttgttcatttttaatttgcaaatcgataacctgaactaatttgttcttattttttgccactgcaaacatatatctacagagagaaaaattaatggcattttaaaggttaaaacattttgaaaaattattagcatgtaacaaagaatgcttgcatttgattagtttcaccagcatttgagagaaggaccctttagctctgtttgttgttcaagaacataagcaaccagtagctcaaatgtagtatcattattaagtttaagtcactggaatcttctttaaaggaaggataagacattgccatctctatttaactcatccatatgggtcaatcaactgattagaaaatcaaaaaacaataaaaactttttttttttttttttttttagtagagacgggatttcatcatgttgcccaggctggtcttgaactcctgggctcaagccatctgcctgcctccacctcccaaaatgctgagattacaggtgtgagccaccatgcctggcctaaactaatttttagatagttcctggtcactcaaatttaagaatgtcagcaatgtcaattttaaatgctcataggtctttccatatctgtaacatgaaaatgattattctgcattttattcagtagtccaaattaaagaaaatgtttttctcaatttaaaataatttctttttcttttgtttatgcaagtgcatacatgcttcactgaaagcaaaaccattataattacattaaagtttataaaatatgatattttaacctcatatctaataagtatgtacaaaggtaaccatcactccttaaatccacatgaaaactactgtaactgatcatgtattttggaattagacttgataataaaagattatcatgtatcacatatctcacaccaggggaacaattagctacataattgtcataccttaatatcttttaaaggtaacagtaattttcaacacattttattttaaaatattattttaacaaaagttacattcctctccacaatgaggctaaatgtcacccacgaaagaactttattcccttatattcctgaaaagaaatcagaattaacatttttatgttgaataaattttaaaatttaggaaatgttctatttaaagttaatttctttcataaagccattactctttacattgtcatttccaaaaagccacaatttcccatgctggatgtgatgaaagttaggcacacctttactgcattagcagcctttgacaatgacttcctcaaactgacaccatcttaattagatgcagggacagggatcagatgggacaatatcaaatttactttgtgccctacaagttaaaaactgcacccattctgtaaattgaatatagaggttctcccttggccactgtcagcttttcttgactggccaaaactgcccattcttcctggaatggtatgaaagcttcagcaaaataaataaaagtcagaatctttgctggtccctttaatgctgatttgatagtaaatcaatttcagctgagacataagggctgtcagtctatcatataaacatctttaactatagcctagagaaaagagggttgaagagcaaagcagattttttttttccttttctatatcttgttctgaacaacacactgtgataaaggggactagagtggaagattccctatttaaacacatgaagctctgggtcctagccttttttggttataagccctttgagaatctgataaaagctgtggatcatctcctaggaaaatagaacaaaacatacatattcacattacacagttccagagtatgtggaccccccaaagtccagagattgccctaggggatctttagattcttgtttagaactgttgattttgaacacaacatacactgtcaaactttacatcagggatccaacataactcagacatagcccaggtagcctgtttctaacacaactgtcataatcctgaaatccaaaattgcactgtgtttgacatgagatagtttaagttccacaaaatccaaatttaccatattattgtttttaaaaaagcagtttagagcaaactgtcactaaacttggataaatgggtcagaaagtacagatttaataaagtcgtacctctaatgttcaaaaaaaaaaaaa

SEQ ID NO: 2439 - DNA, 4544 bp, Homo sapiens
cagcccggccggggcctgcgggcgcccagagccgcgccgtccgcgccgcccgttctggttggaagtactccatgacacacactcggagaaagtcccttcccatgctgagttcgggcctcactggccgccgagagcccctgcagatggaagacagcaacatggagcagggggttgagggtgtggagccaggcatgcccgagagcccaggtcacctcacagggcgccgcaagaattacccacttcgtaagcgcccattggttcctgagaagcccaaggcctgcaaagtgctgctgactcgcctggagaatgtggccggtccccggagtgcagatgaggctgatgagctaccgcctgacctgcccaagccccccagcccggccccatccagtgaagaccctggccttgcccagccccgcaagcggcgcctggcctccctcaatgctgaagctctcaataacctgctgctggagcgagaggacaccagcagcctggcaggcacccgccgcagtcgagcaggggatccccaccgcagccgtgaccgtgatcgtgctactgggggctggtcctcctccaagaagcggccccggctgggggaccttggaggaggaagtcgggacctgtctccagagccagcacccgatgaaggtccccgccgagatggagacccagctcccaagagactggctagcctgaacgcagctgctttcctaaaactgagccaggagcgggagctacccctgcggctgcctcgtgcccatgcagaagtagatgggcgctccactgagcccccagcacccaaggccccgaggccaaagtggcccaaggtcaatggcaagaactatcccaaggcttggcagggggccagctctggggaggctgcaggcccacctggctggcaaggctgccctgatgaaccatggccatctgcaactccttgtgggccatccgtccagccatctcatcagcccctgagcaaggctctggagagccctttggggctgcgccctcacctgcccctgctgatgggtggacaggcggctctgaagccggagcctgggcgcccaggcgaggagtcacctgcccctaagcaggaactgcatcagccctctttccccacacctcagctgtcgccgctgccgatgcctggcaaccccgccgactacaatggcctgtgtgttgggcctgagctcactgcactaggcagcttctacctgtactgtggccaagaggggctgcagtgtgggggctactcgccctgccccatgcttcctgagggcaagctgtccccagtggctgcacctcacgaggaggggctcctcttagctccgagctcagtgccctcaggcacccctttccagcaccctccctggggctcctctcgctactgctctagcgaggacactggagtgaatggctacagcatctgcggagtgttgcccctgtctgttacccacgctggcactacctgtggcggctgcccatacaaaatgccttttgcagcagaaggctgcagatccctgggccagttggaatttcctctcccggaagctggccacccagcctcacccgcccacccactcctggggtgccctgtacccagtgtgccacctgcagcagagcccgtcccccatcttcagacacccacctcggagccccagacagtagcccgtgcgtgccctcagagcgccaaacctcccagcggttctaagtcaggtctgcgcacaggctccagctgcaggcacactgcaaggagcaaggctgcccgcaggcctagccaccccaagcagccacgtgtccagcgcccacgccctcgccgccgccgtcgccgccgcactaatggctgggtacctgttggggctgcgtgtgagaaggctgtgtatgtcttggatgagccggagccagccatccgaaagagctaccaggcggtagagcggcatggggagacaatccgagtccgggacaccgtccttctcaaatcaggcccacgaaagacctccacaccttatgtggccaagatctctgccctctgggagaaccccgagtcaggagagctgatgatgagcctcctgtggtattacagacctgagcacttacagggaggccgcagtcccagcatgcacgagcccttgcagaatgaagtgtttgcatcgcgacatcaggaccagaacagtgtggcctgcattgaggagaagtgctatgtgctgacttttgccgagtactgcaggttctgtgccatggccaagcgccgaggtgaaggcctccccagccgaaagacagcactggttcccccctctgcagactattccaccccaccccaccgcacagtgccagaggacacggaccctgagctggtgttcctttgccgccatgtctatgacttccgccacgggcgcatccttaagaacccccagtagcctcctcatgcccatgctggggctacccatgggcaagtggggctcggggtagggggcactgcttgaagcacagcacttggttagggggccacagaggcctaagtttgctggcctgtggttttcttgggggggagggcaggggcccctgtgggttctgggctccaggggagggagctggggaggccagggtataagaaaagcatcagaactctcagcttggcccaaggtaccttctgtggttcccctgggtggagatttccgaaaagtagtcttctctgaggctgggccaagcctgagggaaatggggccctaggagggtgggggcgggaaggaggggcaaggtctttcaggaaccagacccaacaggcccttctgtagcctcccccttgccctcaaagggggagtgggggccagctttacctcacccactgtgacccgccgcttccccttcagcctgggaccaggctttcctagatcccagcacagctctgagcttgttcctttgaggcatagagagccagagtctggcttccagagcattgacttcctcttcctagacttgaggccttttctctggctttcctcctttgccctgcagtagcaactggtgctgggacaagttgacccacctctcacagtcatgggtgtggcccacttgtgggagtctcctgtccacctcccagagacggccacccagcgggtctggcttcccagaaagttaactgatgattgtggggtttgtcatatctgggagggaagatgggtgctgggagagggttgggggcagggggcaaggaaaattgctacctgatttgttgaagatttttcctcttgccttacacatggaggttccaggaaacctcttgcagaacttcacacgtgattcttcaagccacacccacctgaaatcaaaccaaaggagtgctgtggctccccttgccctgccaccctttccctagtcttttgtagattgcactaatttacatcctagcaagaatcaacactgtatcagtccacggacctgctgagctgcagccacttgctctaggagctaaggacttgcattttcagtttgttcctgttgcccagaggccctgttctcacctcatgctgctccccagagtagactaacaggctcagtcccctgttgtccttgtggagactaggccttggccctggccctgagactctgtgagggggctggagcagcctggttatttcctatctgtaccaaagaggagtatggtgggagagggagtggagtgcagtgtggcttgggcctggtgctgggaacctgctagctgagcacttccacaagggcatacccctgggggcaggggctggggctgagaactgcagccctgggtcttcccttagggaggaagggcagatgaacccagcaggcttaggaggtggcactgggtgaggacagctgggcaggggctgcagagggaggtggaaatgaaccctgagggctcccccaacttgccatgccctgtcccttagtagatgagttgctcctgattggtcattgggtttgggtgaggcctggaggcttcagaggtgaatttatgcttgggaagcctgatcccaaacctgaagggaagggacttggatctccttatattgaataagctgtttggaggaaggtgtctgtctgggaggatggggcagtaaatgaggttggcagagtggcagtgggggctctgcagagccagccttggagcctgctcattctgggcccttgctgccaaggagcccagcctcacctagcaggaaaggagatgaaggccctcctcccaggaggtagggtcttggctgccccgaacttaaatgcttttgaaatctcttagatgtggaaatattttttcgaacctgaaaatgcagctggtagaatttcaatggaagcataatccatgtaaaatatattttagttgatattttgtaaaatgcactttttgtgtgtgttgatcctggtttcccagatctgtatttcagtgtttacaagggaggaaggacctttcctcacctcccttttgacagagattagaagtacttctttaagaaaaaaataaatttgagaaattgtattgatttagaaaaggatcgtttaaaaaaaaaaaaaaaaaa

SEQ ID NO: 2440 - DNA, 770 bp, Homo sapiens
accacaggtgcaaagattcactttatttattcattctcctccaacattagcataattaaagccaaggaggaggaggggggtgaggtgaaagatgagctggaggaccgcaataggggtaggtcccctgtggaaaaagggtcagaggccaaaggatgggagggggtcaggctggaactgaggagcaggtgggggcacttctccctctaacactctcccctgttgaagctctttgtgacgggcgagctcaggccctgatgggtgacttcgcaggcgtagactttgtgtttctcgtagtctgctttgctcagcgtcagggtgctgctgaggctgtaggtgctgtccttgctgtcctgctctgtgacactctcctgggagttacccgattggagggcgttatccaccttccactgtactttggcctctctgggatagaagttattcagcaggcacacaacagaggcagttccagatttcaactgctcatcagatggcgggaagatgaagacagatggtgcagccacatgcacttacgtttgatctccaccttggtccctccgccgaaaacagatgtgctggcagaagcaaagtcctttgtccggccacgtgcaaatgcatgggacataaatatgaacagagattcttgtcccactctagaaaatgtagatgttcatcttgtttccaaggggacaggaccttttatcatatctcatgtgcccatggcatttgtcactgccatctgcacaacactgaactccagcaacatcaactga

SEQ ID NO: 2441 - DNA, 2233 bp, Homo sapiens
gctgagcaggagatgggaattgaaacctgcgcagaggcggctgtgcagggtgagagtggagccgaaaccacagaaagtgaagtttgcttcaacgtcttgtcccggcaggccactcagatgtgagagtgaggaagtgggatggggcctgaccggaaggaggtgcccctgagccgaggaacgcaggcggtggtcgtggggaagggaagaggagccccgggagacgacagcagcatgggtgggcggccttcgagccctctggacaagcagcagcggcagcacctaaggggtcaggtggacaccctgctgaggaacttcctgccttgctaccgtgggcagctggcagcgtctgtcctgcggcagatctctcgagagctgggccctcaggagccgaccggaagccagttgctacgcagcaaaaagctgccccgagtccgtgagcaccgaggacccctgacccagcttcggggccacccaccccggtggcagccgatcttctgtgttctgcgtggggacggccgcctagagtggttcagccacaaggaggaatatgaaaacgggggccactgccttggctcaacagccctgacaggatacacgctcctgacttcccagcgagaatatctccgccttttggatgctctctgccctgaatccttgggagaccatactcaggaagagcctgactccctcttggaagtgcctgtgagcttcccgctgttcctgcagcaccccttccgccggcacctctgcttctctgcagccaccagggaggcacagcatgcctggaggctggccctgcagggtggcatccggcttcagggcacagtcctgcagcgaagccaggcccctgctgcccgggccttcctggacgccgtccgactctaccggcagcaccaaggccactttggcgacgacgacgtgaccctaggctcagacgccgaggtgctgaccgcggtgctgatgcgggagcaacttcccgcgctgcgagcccagacccttcctggcctgcggggggcaggccgcgcccgcgcctgggcctggaccgagcttctagacgccgttcacgcagctgtcctggccggggcctccgccgggctctgcgccttccagcccgaaaaggacgagctgcttgcgtcgctggagaagacgatccgcccggacgtggaccagctgctgcggcagcgggcgcgtgtggcggggcggctgaggacggatatcaggggaccgctcgagtcgtgcctgcgccgggaggtggacccgcagctgccccgggtcgtgcagaccctgctgcgcaccgtggaagcctcgctcgaggcggtgcggaccctcctggctcaaggcatggaccgactgtcccaccgcctgcgccagagcccctcaggcacgcggctgcgcagggaggtttactcatttggggagatgccgtgggacttggcgctgatgcagacatgctaccgtgaggccgagcggagccgggggcgcttggggcagctggcagcaccgtttggctttctggggatgcagagcctcgtgtttggggcccaagatcttgcacagcagctcatggctgacgccgtggccaccttcctgcagctggctgaccagtgtctgacgacggccctcaactgtgaccaggctgcccagaggctggagagagtcagggggcgcgtgctgaagaaattcaaatcggacagcgggttggcgcagaggaggttcatccgaggctggggtctctgcatctttttaccttttgtgctgagccaactcgagccaggctgcaaaaaggagctgcctgagttcgagggggatgtccttgccgtgggcagccaggctctgaccactgagggcatctatgaggacgtcatccgggggtgcttgctgcagaggattgaccaagaattgaaaaagacccttggtgccaatgatgtatcctgcactctggacggctgcttggaggtcccatgggaacaggagggagcagatgaggaaactgaggctgagcgggaaggaggggcttgtcccaggcagccagactctggtgcccagatccagccactctgcccaccgccttctccaggaacattccggagctgaatcttcacccacatctatcttgtttctattggataaatgtctacaagtggaatttctgggccaaaacggatgtgccatctttaggcttttgtaacccctgcaacttcagaaaactgtaccattttataaaaaaaaaaaa

SEQ ID NO: 2442 - DNA, 3262 bp, Homo sapiens
agagtgctccgcggccgtgtggagcgaggccttgttcccgcgttgagccgccgccgccgccgccgcctcctcagcttcagcctccgcgccaggcccggccccgccgcgccatgtcggactacagcacgggaggacccccgcccgggccgccgccgcccgccggcgggggcgggggagccggaggcgccgggggaggccctccgccgggcccgccaggcgcgggggaccggggcggcggcggtcccggcggcggcggcccgggcggggggtcggccgggggcccctctcagccacccggcggaggcggcccgggaatccgcaaggacgctttcgccgacgccgtgcagcgggcccgccagattgcagccaaaattggaggcgatgctgccacgacagtgaataacagcactcctgattttggttttgggggccaaaagagacagttggaagatggagatcaaccggagagcaagaagctggcttcccagggagactcaatcagttctcaacttggacccatccatcctcccccaaggacttcaatgacagaagagtacagggtcccagacggcatggtgggcctgatcattggcagaggaggtgaacaaattaacaaaatccaacaggattcaggctgcaaagtacagatttctccagacagcggtggcctacccgagcgcagtgtgtccttgacaggagccccagaatctgtccagaaagccaagatgatgctggatgacattgtgtctcggggtcgtgggggccccccaggacagttccacgacaacgccaacgggggccagaacggcaccgtgcaggagatcatgatccccgcgggcaaggccggcctggtcattggcaagggcggggagaccattaagcagctgcaggaacgcgctggagtgaagatgatcttaattcaggacggatctcagaatacgaatgtggacaaacctctccgcatcattggggatccttacaaagtgcagcaagcctgtgagatggtgatggacatcctccgggaacgtgaccaaggcggctttggggaccggaatgagtacggatctcggattggcggaggcatcgatgtgccagtgcccaggcattctgttggcgtggtcattggccggagtggagagatgatcaagaagatccagaatgatgctggcgtgcggatacagttcaagcaagatgacgggacagggcccgagaagattgctcatataatggggcccccagacaggtgcgagcacgcagcccggatcatcaacgacctcctccagagcctcaggagtggtcccccaggtcctccagggggtccaggcatgcccccggggggccgaggccgaggaagaggccaaggcaattggggtccccctggcggggagatgaccttctccatccccactcacaagtgtgggctggtcatcggccgaggtggcgagaatgtgaaagccataaaccagcagacgggagccttcgtagagatctcccggcagctgccacccaacggggaccccaacttcaagttgttcatcatccggggttcaccccagcagattgaccacgccaagcagcttatcgaggaaaagatcgagggtcctctctgcccagttggaccaggcccaggtggcccaggccctgctggcccaatggggcccttcaatcctgggcccttcaaccaggggccacccggggctcccccacatgccggggggccccctcctcaccagtacccaccccagggctggggcaatacctacccccagtggcagccgcctgctcctcatgacccaagcaaagcagctgcagcggccgcggaccccaacgccgcgtgggccgcctactactcacactactaccagcagcccccgggccccgtccccggccccgcaccggcccctgcggccccaccggctcagggtgagccccctcagcccccacccaccggccagtcggactacactaaggcctgggaagagtattacaaaaagatcggccagcagccccagcagcccggagcacccccacagcaggactacacgaaggcttgggaggagtactacaagaagcaagcgcaagtggccaccggagggggtccaggagctcccccaggctcccagccagactacagtgccgcctgggcggaatattacagacagcaggccgcttactacggacagaccccaggtcctggcggcccccagccgccgcccacgcagcagggacagcagcaggctcaatgaatcgaatgaatgtgaacttcttcatctgtgaaaaatcttttttttttccattttgttctgtttgggggcttctgttttgtttggcgagagagcgatggctgccgtggggagtactggggagccctcgcggcaagcagggtgggggggacttgggggcatgccgggccctcactctctcgcctgttctgtgtctcacatgctttttctttcaaaattgggatccttccatgttgagccagccagagaagatagcgagatctaaatctctgccaaaaaaaaaaaaaaacttaaaaattaaaaacacaaagagcaaagcagaacttataaaattatatatatatatattaaaaagtctctattcttcaccccccagccttcctgaacctgcctctctgaggataaagcaattcattttctcccaccctcggccctcttgtttttaaaataaacttttaaaaaggaaaaaaaaaagtcactcttgctatttcttttttttagttagaggtggaacattccttggaccaggtgttgtattgcaggaccccttcccccagcagccaagccccctcttctctccctcccgccctggctcagctcccgcggccccgcccgtcccccctcccaggactggtctgttgtcttttcatctgttcaagaggagattgaaactgaaaacaaaatgagaacaacaaaaaaaattgtatggcagtttttactttttatcgctcgtttttaacttcacaaataaatgataacaaaacctccccgtctgcgggtgctgtctgtctccccccctttccttccctccctgtagttttgaagcggatgtttgttctttatagatgttgtttaaaaagcctgataatggtgattgaaatttacaaactttgtgtttttttttttttaagaaaaatataaaatagttttcttcaggctcaatgtgctttcctaaccgtgccccccccccttttttttttttgttaaataaagtgctttttgtttaaaaaaaaaaaaaa

SEQ ID NO: 2443 - DNA, 2671 bp, Homo sapiens; identical to SEQ ID NO: 1794

SEQ ID NO: 2444 - DNA, 1258 bp, Homo sapiens
tccactcacagcctgaagcatacccggcaggggctgtccccaggcccaacaagcaaagggcccagtagcgagggccactggagcccatctccggggggctgggcaggaagtagggtggggtttggggtagggatctggtaccctgggactgctgcaactcaaactaaccaacccactgggagaagatgcctgggggtccaggagtcctccaagctctgcctgccaccatcttcctcctcttcctgctgtctgctgtctacctgggccctgggtgccaggccctgtggatgcacaaggtcccagcatcattgatggtgagcctgggggaagacgcccacttccaatgcccgcacaatagcagcaacaacgccaacgtcacctggtggcgcgtcctccatggcaactacacgtggccccctgagttcttgggcccgggcgaggaccccaatggtacgctgatcatccagaatgtgaacaagagccatgggggcatatacgtgtgccgggtccaggagggcaacgagtcataccagcagtcctgcggcacctacctccgcgtgcgccagccgccccccaggcccttcctggacatgggggagggcaccaagaaccgaatcatcacagccgaggggatcatcctcctgttctgcgcggtggtgcctgggacgctgctgctgttcaggaaacgatggcagaacgagaagctcgggttggatgccggggatgaatatgaagatgaaaacctttatgaaggcctgaacctggacgactgctccatgtatgaggacatctcccggggcctccagggcacctaccaggatgtgggcagcctcaacataggagatgtccagctggagaagccgtgacacccctactcctgccaggctgcccccgcctgctgtgcacccagctccagtgtctcagctcacttccctgggacattctcctttcagcccttctgggggcttccttagtcatattcccccagtggggggtgggagggtaacctcactcttctccaggccaggcctccttggactcccctgggggtgtcccactcttcttccctctaaactgccccacctcctaacctaatccccccgccccgctgcctttcccaggctcccctcaccccagcgggtaatgagcccttaatcgctgcctctaggggagctgattgtagcagcctcgttagtgtcaccccctcctccctgatctgtcagggccacttagtgataataaattcttcccaactgca

SEQ ID NO: 2445 - DNA, 4254 bp, Homo sapiens
atgtagtggggacccggtgcttgctgccccaccctgctggggtctcctccggaaatgagtgggtgcgggtgactcgtagggcacccagccctctgttccttcgggagtcctccgctcccgctccgggccgccagcctccttcagacgcagagcgggcgggcggctagtgcgcgccgagggctcaggggccggcgccgcgaggggctgcaggccgcgctcggccgctgtccgggccgcagcagccattgtttgatgtcctgtgactgagaaaccaggctttaaactttatgcctttggagatggagcccaagatgagcaaactggcctttggctgtcagagaagttccacatcagatgatgactctggctgtgcattggaggagtacgcctgggtccccccgggcctgagaccagagcagatccagctctattttgcttgcttaccagaggaaaaagttccttacgttaacagccccggagagaagcatcggattaaacagcttttgtaccagttaccaccacatgataatgaggtacggtattgccagtctttgagtgaagaggagaaaaaagagttgcaggtgttcagtgctcagcggaagaaagaagcactgggaagaggaacaattaagcttctgtccagagcagtcatgcatgctgtgtgtgagcagtgtggtttgaagataaatggaggtgaagttgcagtgttcgcctcccgtgcgggccctggtgtgtgctggcacccatcctgttttgtctgtttcacgtgtaatgagctgctggtcgacctcatctatttttatcaggatggaaaaattcactgtggcaggcaccatgcagaactgctcaaaccacggtgctcagcatgtgacgagataatttttgctgatgagtgcacagaagctgagggtcgccattggcacatgaaacacttctgctgccttgagtgtgaaacggtcctgggaggacagaggtatatcatgaaggacggccgccccttctgctgtggctgttttgagtctctctatgcggagtactgtgaaacctgtggggaacatattggtgtggaccatgcacagatgacctatgacgggcagcactggcacgccacggaagcctgcttttcttgtgcccagtgtaaagcctctttgttgggatgtcccttccttcccaaacagggtcagatttactgctcaaaaacgtgcagtcttggtgaagacgtccatgcctctgattcttccgactctgcatttcagtcagctcgatcaagagactcccgaagaagtgtccgaatgggcaagagcagccggtcagcagatcagtgtagacagtctctcctcttatcgcctgctctgaactacaagtttcctggcctctcaggcaatgctgatgacaccctttctcgaaaattggatgatctgagtctctccagacaaggaacaagttttgccagtgaagaattttggaaaggcagagtagagcaggaaactccagaagaccctgaagaatgggctgatcatgaagattatatgacgcagctcctcctcaagtttggtgataaaagcctctttcagccacagcccaatgagatggatattcgagccagtgagcactggatatctgataacatggttaaaagtaagaccgagttaaagcaaaataaccagagccttgcaagtaaaaaataccagtctgatatgtactgggcacagtcacaagatggactgggcgattctgcttatggcagccacccaggccctgcaagcagtagaaggcttcaggaattggaactggaccatggggcttcagggtataatcatgatgaaacacagtggtatgaagattccctggagtgtctgtcagacctgaaaccagagcaaagtgttcgggattcgatggattctttggcattgtccaatatcacaggggcttcggtggatggagaaaacaagccaaggccatcattgtattctctgcaaaattttgaggagatggaaacagaagattgtgagaagatgagcaatatgggaactttgaactcttccatgctgcacaggagtgcagagtccttaaagagtctaagttcagagttgtgtccagagaaaatcctgcctgaagagaagccagtacatctgccagtgctcagaaggtccaagtctcaatccagaccccagcaggtcaagttttctgatgatgtcattgacaatgggaactatgacattgaaatccggcagcctccgatgagtgaaaggactcggagacgcgtctacaattttgaagagaggggatccaggtctcatcaccaccgccgccggagaagtagaaagtcccgctccgacaatgccctgaatcttgttacagaaagaaaatactctcccaaggacagactgcggctgtacacccccgataactatgagaaatttatacagaataaaagtgcccgggagatccaagcatacatccagaatgctgatctctacggacagtacgcccatgccacttccgattatggcctgcagaacccaggaatgaatcggtttctgggactctacggcgaggatgatgattcctggtgttcttcctcctcctcctcttccgactcggaagaagaaggatattttcttggacaaccaatccctcaaccccggccacagagatttgcctactatacagatgacctttctagtccaccatctgcacttcccacccctcagtttggtcagaggacaacaaaatccaagaagaaaaagggacacaagggcaaaaattgtattatttcttaaccaagtagtgatgcagagcatttgtttaaaacttagccattaaccgtctgaatcgtttccttttcttccgtaggaaagttgtgaaaatagtttaaagtgctttctttgcccatgtaaatgagaactcaactgctgtttacagtgtcagattaacatttgaaaggtgtgatttctccaatttaccctctttggatggtgccaggtggacgtgacatctcgtgcctgtccggtgcgggtgcgttacagatggacgtagctgctttggttttccagtcctcaagggaatactgaagatgctgactgaaggggattggatgttgattttagaagatggagaactccagccacctttgtaaagcactagtgtttgtcatttatgtaagtcaggtcggctcaggtcttgatagtccgtcttggtgtgaggcatgcctgtcacgatgacctagctaacactgtgcatcttattgtgaggccagcttgtcccctcgaaccctctttggccaggtaaacattgtattgtatcagcgccagctacagattgaaaaaaaaaaacaaaaaacattgctatttataacttagtatttcatagacttaagtgtattcctaatttaacggtgcaaatattaatgtatatactgtacagttcagattttaaagctgatatttttatatccctgaattgtaagccgtttgttacgctgcagtgctagatttgccagggaaccagaatttatggatgaactgattgcttatattttagtcagggtttataaatgtagatggtcaaatttacattgcctagtgatggaaaattcaactttttttgatttttttttccaatattaaaaaaggctctgtatgcatggtggggctatgtaagtactctttaaaactatggccctattaatcttacaagtgttacttatgggtcaagcaatgtaaactgtataaatgtaaaaacaacccctccacacacataacccctggaatatatggtaaaaacaagtagaagctgtttcagcgagtgggttttttccccctgcctgcggggggtgcctttctcattttcagcaaggtgatgattatctcatgggaaatgacaaagatctgcttttgtggcagaggactttgtagatttgttattttaagagaggttattcctttttattccttccctcccactaatttgttggcctttaacagcaattttgaaaactgggtcttctggttatgtttttgttttaaaatctttaaattagaggatgctgtgccattgagtactgtaagttaatatgaggttctggttcaaggaaaacttacgttggatctgaaccaatgagcagatattttgatatgtgccactcttgcatatacatctcagtcctaactaaaggttctagtggcatccaggacctttagggaggcatttaataaacacttaataaataacaaaactacctttctgaatata

SEQ ID NO: 2446 - DNA, 942 bp, Homo sapiens
atgagcaaccaggtgctctgctgtgtggtcctttgtctcctgggagcaaacaccgtggatggtggaatcactcagtccccaaagtacctgttcagaaaggaaggacagaatgtgaccctgagttgtgaacagaatttgaaccacgatgccatgtactggtaccgacaggacccagggcaagggctgagattgatctactactcacagatagtaaatgactttcagaaaggagatatagctgaagggtacagcgtctctcgggaggagaaggaatcctttcctctcactgtgacatcggcccaaaagaacccgacagctttctatctctgtgccagtagtataggggcagggctcccttctagcaatcagccccagcattttggtgatgggacccgactctccatcctagaggacctgaacaaggtgttcccacccgaggtcgctgtgtttgagccatcagaagcagagatctcccacacccaaaaggccacactggtgtgcctggccacaggtatcttccctgaccacgtggagctgagctggtgggtgaatgggaaggaggtgcacagtggggtcagcacggacccgcagcccctcaaggagcagcccgccctcaatgactccagatactgcctgagcagccgcctgagggtctcggccaccttctggcagaacccccgcaaccacttccgctgtcaagtccagttctacgggctctcggagaatgacgagtggacccaggatagggccaaacccgtcacccagatcgtcagcgccgaggcctggggtagagcagactgtggctttacctcggtgtcctaccagcaaggggtcctgtctgccaccatcctctatgagatcctgctagggaaggccaccatgtatgctgtgctggtcagcgcccttgtgttgatggccatggtcaagagaaaggatttctga

SEQ ID NO: 2447 - DNA, 18815 bp, Homo sapiens; identical to SEQ ID NO: 979

SEQ ID NO: 2448 - DNA, 4292 bp, Homo sapiens
ttctgcctgtcgccccaaaatggcggacacaatgagccggcgacgcgccggttgtccgtgaggtggctgtgaggacgaacggtcggcgaggctccacagtccaggcagaagaccctcgaccaagcaggaagaagaggaggaggcggcccaactgttggccgacttcccgctagccgccggcgcggcgcccgccccgcctgggttggcccctcggcagcccgcccgctcgccgccgggccccgccccggccctgcgccgccgctgccttccccagccgccgccatgaagctgaccgacagcgtgttgcggagcttccgcgtcgctaaggtgttccgcgaaaactcggacaagattaactgcttcgatttcagccccaacggcgagacggtcatctcgagtagcgacgacgactccatcgtgctctatgactgccaggagggcaaaccaaagagaaccctgtacagtaagaaatatggtgtggacctcatcagatacactcatgcagcaaacacagttgtttacagctctaacaaaatagacgatactattcgttacttgtccttgcatgacaacaaatacatcagatactttcctggacatagcaaaagggtggtggccttgtccatgtcacctgtggatgacactttcatttctgggtctcttgataagaccattcgactctgggatctccggtctcctaactgccagggcctcatgcatctgcaggggaagccagtttgttcttttgatccagaagggttaattttcgctgcaggtgtcaactctgaaatggtcaagctttatgaccttcgttcttttgataaggggccatttgctacctttaagatgcagtatgatcgaacttgtgagtggacaggacttaaattcagcaatgatggcaagctcatcctcatttccaccaacggcagcttcattcgtctgattgatgcattcaaaggagtggtgatgcacacatttgggggttatgccaacagcaaagctgtcacactggaggcttcatttactccagactctcagtttattatgattggttcagaggatggcaagatccatgtctggaatggagagagcggtataaaagtagctgtgttggatggtaaacacacaggcccgattacctgtttgcaattcaaccccaagttcatgacttttgccagtgcgtgttccaacatggccttttggttgcccaccattgatgactgaccctgttgctgcttggctatttctgtatagtgagggcggccagcaggaagaaactcagagggaactgagataatagtgggattggatcatttgactgggctggagaacatccttttacatggccttcccatggatgtgctgtacatctgctcaaaagaaaataattactttgatgagcgtcttcaaaaggactcttggtgcaacagactcaattggaactcagcttttctaactgtcactgcaccaagctctgctggaggagtgaccagactcacgatttggtatagtggggctctcaagcatcttcaatttgaatgtacatgctgctgaggagccggtgaagtcatcagttccgcacatcccttctaccctccaactgcatgggaagccaaagtcctggttttgaaatgcttgggcagctcagccgcttgccctcaccctgcatgtcttgttactgggtctccctgtgtacttgtggcattatccacaaccatcatgtttcttaggtgccaaacatttacagaaacattttcatatatcttggggtcagagaaagggacagatacagaaggaccttgcttgcaggaagccatgcagttagtttctgcagttagtcgtgtgaggctaggtggttgggcaggcctcgggctgtaggtgttgggtgggaaaaagacccaagggcctgaaagggagggaaaggggagggtagcgggagggtagcaggtgagttcctagggctggaaggtttagcagcagcctggtgcagtgccctgtcatcaagacaaacccacggtcctcctgggtgcctaccaagcttggtttgtacaaaagcaaggtgggagtctatttttgtacatgagatacatcacacttacctgtgggccagtattgtgaagtgagtctgagttgtttacactgatgccttccctgcccaccacaaattgtgtacatagtcttcagatgataccacccctttccccagctcccaaccaagagctggttctaggcctgtgttatatgtcatatttagcgtttttatatatgacctttgatttctgttgtttgtattttagcacagtgtatgcaccttcatttaaatacatctgtgtgcatacagatacgcatatatgtgtgtgcgtatgcatatatctctcatctgtagtttccaagagttcagctgaagcagatggagtcctgcagcccaggagacaccctgcatccctgctaatagtgtttgccacaagtattagtgagtcttccttattaatattttcatttcagaagactgaagcaaagctgatagtgtttgctgtttctttggcagctaagtgagggtcttgggatgacttgctgtgttcctcaagctgcactttggggccatctctgcagtattagccccctttttgcttggtggtactctgtctgtgcctgtgtgtgtgtgtgatagtcactcttgcatggcttccatgtctggtttgtggcatttggggataaggtgctgaagccagagcatttgcagtttgtttgaggcctcgttgccaatgatagatcactcctgttgacctggtatgtctgcttgcttgctgcttttccttgctttctcttggaagaggaaaggactctggtcaggcccaggctgagtgagatgagctgcagctggctcatggccttcttagagcagagagaggagtatgtcattttactaagttcctaaacaaacatttatgcaggcaacactccttgcagatccagaaactgaggcacaatagggttatgacttgctcaagaatatgtagctgctagggggtaaatcaaggcatcacaatttctgttcagcgggcaggaataggctgtgaattgctagcactttttttttttaagcaattactttttgacttgttcctctgaaagtgcaagaggcgtacacctttcccaaatgtagactagaatctgcaggatgccacccactgtatagttctgctttcccagagaggaagaacttttagaaaccaaatgatcttaattgttattgcccacccctggcttttccgggtagaaaattcacagtaggaatgattgttaagagagagtgcttggaaccatgggttaacaggaaaggctacctaacttcacatatctgcaaccagagcagccaccaagcattacttagcagcaggaaaatgattgtatttgagttcctgtgtgtccaaaactgagcaccatgttctttgaaaacatgccacctcaaggctgggcgcggtggctcacacctgtaatcccagcactttgggaggccgaggcgggcggatcaccggaggtcgggagtttgagaccagcctgaccaacatggagaaaccccatctctactaaaaatacaaaattagccgggcgtggtggcatgcgcctataatctcagctacttgggaggctgaggcaggagaattgcttgaacccaggaggcggaggttgcggtgagttgagatcgtgccattgcactccggcctgggcaacaacagcaaaactccgtctcaaaaaaaaaaaaaaaaaaatgccacctcacagtctctatcgttgggccctgtggttgcaaagctgcctcctgaattaagaaggaaagggaaaagatatagctggaagcgagtggaagagatgctgagggctggggctgcacagacgtgctcagcagggctacaggtgctcaagccctattggggatgggtggggagtggggcagcggcgtttgccaccttaagaattggggccaaagccactgatgtttatttgacagtgacactgcactgggtacttaaagaaattatttcccgttgtaattataattactgcttattaaggaaaatatgggaattttagaaagaatcaagtttgccacccaaatgctaccactgttaatcttttggtgttaaatgttccccctagacatttctgtgcatagatttttggtgtgtttacatagtcgttattctgtatatacaattttatgtcccttttgtacttaacgtataaacattttttccatgttacagtcttaaacagaattttatggctgc

SEQ ID NO: 2449 - DNA, 2095 bp, Homo sapiens
gtcggggccgctgcggacggaagggcgcctgtgcttcgtccgctcggcggtggcccagccaggcccgcgggactcagaccagcggggagcgcggcctccgcccttggggccctcccgccgggccggagacccaagcccccaacgccaggccctgccctggaagcgctcgcggcccggcgcctggacgggggagttgctgctctttggcgtaaattgcaatcgattagggatcgtttctcagaatcaagttagaagtgagagttcagataagtgaggccgccattgctgctttgaacacctcagaaggggagaatggatttatcaggagtgaaaaagaagagcttgctaggagtcaaagaaaataataaaaagtccagcactagggctccttcacctaccaaacgcaaagaccgctcagatgagaagtccaaggatcgctcaaaagataaaggggccaccaaggagtcgagtgagaaggatcgcggccgggacaaaacccgaaagaggcgcagcgcttccagtggtagcagcagtaccaggtctcggtccagctcgacttccagctcaggctccagcaccagcactggctcaagcagtggctccagctcttcctcagcatccagccgctcaggaagctccagcacctcccgcagctccagctctagcagctcttctggctctccaagtccttctcggcgcagacacgacaacaggaggcgctcccgctccaaatccaaaccacctaaaagagatgaaaaggagaggaaaaggcggagcccatctcctaagcccaccaaagtgcacattgggagactcacccggaatgtgacaaaggatcacatcatggagatattttccacctatgggaaaattaaaatgattgacatgcccgtggaaaggatgcatccccatctgtccaaaggctatgcgtacgtagagtttgagaatccagatgaagccgagaaggcgctgaagcacatggatggaggacaaattgatggccaggagatcactgccaccgccgtgctggccccctggcctaggccaccccccaggagattcagccctcccaggagaatgttgccaccaccgcctatgtggcgcaggtctcccccacggatgaggagaaggtcccgctccccgaggcgcaggtcccccgtgcgccggagatcacggtccccgggccgccgccgccacaggagccgctccagctccaactcctcccgataaacaggccactgaagctctcgcccctgtaacttataccccacccagctcagttttgtcacttttctagccaaaggaagaccagtaggaaagcaaacccttgactctggcaggatttgcaggcagcaggcagcacccctctgccagccgggccccggctgcagaagtgctgttggtttggatgctgtgtgcctgtcaagattccctccggttttctggctagaaagctcatccgtttccggtttctaagagtcagttcagtggcagagccaccagggaaaagtgaggctcttgggggtggtttgaccctgcttacctgggagcacacttttcccttccccgatgacctgggatggtggccaggccgtgcccttgctgttgctgggcagtgtccttttggaaagggagctgccccaggctttagtgcagctgccaaccctgttaggcctggcctctcgaggcctcttctgacctcaagggtcacaccccctcaaagatcctctcacccatggtagttgctgctcgtggttctgtctgtccgtgcaccgatgcacacaccgcaccccaccactgtactctgaaattggcgagtgagtggagagccagctctgcggagtcatcacgcagccatggttgtgcctgccgttcatggtggtctttcaggttatcttggcaacatgtacattgcttttattttttttcttttttgctttcattgtacagtcagtactataaaatttctcttttgagttttatacctttgtagcattttagatgacattgtgtttgtactttgttgtgtagagtggaagaattgtgttgaataaacccaagatcggaatgcaaatctagttctgggttcactgcc

SEQ ID NO: 2450 - DNA, 6209 bp, Homo sapiens
gttctatccggggccttggcgcttctctttcctttcgcgccggttgccgctgcggagcgcggcgggtccatgtgcgcagtgagtggcgctattcctggcccagtagcacccgagccccgggtttgaccgagtccgcgctgcgatggaccccaacaccattatcgaggccctgcggggcaccatggacccagccctgcgtgaggccgcggagcgccagctcaatgaagcacacaagtctctgaattttgtctcaacactgctccagattactatgtcggaacagctggatttacctgtgagacaggcaggtgttatctatctgaaaaatatgataacacagtattggcctgatcgagaaacagcaccaggggatatatccccttatactattccagaagaagatcgccattgtattcgagaaaatattgtagaagccattatccattctcctgagctcatcagggtacagcttactacatgcattcatcacatcatcaaacatgattatccaagccgctggactgccattgtggacaaaattggcttttatcttcagtccgataacagtgcttgttggctaggaattcttctttgcctttatcagcttgtgaaaaattatgagtataaaaaaccagaggagcggagtccattggtagcagcaatgcagcattttctgccagttctaaaggatcgttttatccagcttctttctgaccagtctgatcagtctgtcctcatccagaaacagatattcaagatcttctatgctcttgttcagtatacactaccactggaactgataaaccaacagaacctgacagaatggatagaaattttaaagactgttgtgaacagggatgtacctaatgaaacacttcaagttgaagaagatgatcgacctgagttaccatggtggaaatgcaagaagtgggccttacatattttagcaagactttttgaaagatatggaagccctggcaatgtttccaaggagtataatgaatttgctgaagtatttctgaaggcatttgctgttggtgtccagcaagttttattgaaggtgttatatcagtacaaggagaagcaatatatggctcctcgagttttacaacagacattaaattatattaatcaaggagtttctcatgctctcacctggaagaatctgaagccccatatacaaggcattatccaagatgttatttttccattgatgtgctatacagatgctgatgaggaactttggcaagaagacccttacgaatatatacgcatgaagtttgatgtgtttgaagatttcatttctcctaccactgctgcccagacacttttgtttacagcctgtagtaagaggaaagaggtactgcaaaagactatgggattttgttaccagattcttacagaaccaaatgctgaccctcgaaaaaaagatggagccctgcatatgattggctctttagctgaaatacttctgaagaaaaagatctataaagatcagatggaatacatgttgcagaatcatgtattccctctcttcagcagtgaactaggctacatgagagcaagggcttgctgggtacttcactatttttgtgaagtgaagttcaaaagtgatcagaaccttcaaacagccttagagctaacaagaagatgtctgattgatgatagagaaatgcctgtgaaagtggaagctgccattgcccttcaagtattgatcagcaatcaagaaaaagctaaagaatatatcacaccattcatcagacctgtaatgcaggctcttcttcacattataagagaaacagaaaatgatgaccttaccaatgtaattcagaaaatgatctgtgaatatagtgaagaagttactcctattgcagtagaaatgacacaacatttggcaatgacatttaaccaagtaatccagacggggccagatgaagaaggtagtgatgacaaagcagttactgctatgggaattctgaatacaattgatacacttcttagtgtagttgaagatcataaagagataacccaacagcttgagggaatctgcttacaggtcattggtactgttttacaacagcatgtcttagaattctatgaggagatcttctctttagcgcacagtttgacatgtcaacaagtgtctccacagatgtggcagctactaccccttgtatttgaagtctttcagcaagatggctttgattactttacagatatgatgcccctccttcataattatgtaacagttgatacagacacacttctgtctgacaccaagtatcttgaaatgatatacagtatgtgcaaaaaggttcttacaggagttgcaggagaagatgcagagtgtcatgcagcaaaattgttagaggtcatcattctgcagtgcaaagggcgtggcattgaccagtgcattcccttattcgtggaagcagccttagaaagactgacaagagaggttaagacaagtgaacttcgaactatgtgtctgcaagttgcaattgcagctttgtattataatccacacctactactcaataccttagaaaatcttcgcttccctaataatgttgaaccagttacaaatcattttattacacagtggcttaatgatgttgactgtttcttggggcttcatgacagaaagatgtgtgttctcggactctgtgctcttattgatatggaacagataccccaagttttaaatcaggtttctggacagattttgccggcttttatccttttatttaacggattgaaaagagcatatgcctgccatgcagaacatgagaatgacagtgatgatgatgatgaagctgaagatgatgatgaaaccgaggaactggggagtgatgaagatgatattgatgaagatgggcaagaatatttggagattctggctaagcaggctggtgaagatggagatgatgaagattgggaagaagatgatgctgaagagactgctctggaaggctattccacaatcattgatgatgaagataaccctgttgatgagtatcagatatttaaagctatctttcaaactattcaaaatcgtaatcctgtgtggtatcaggcactgactcacggtcttaatgaagaacaaagaaaacagttacaggacatagcaactctggctgatcaaagaagagcagcccatgaatccaaaatgattgagaagcatggaggatacaaattcagtgctccagttgtgccaagttctttcaattttggaggcccagcaccagggatgaattgagttatctctttctttcctgctgtgtgcttgtagtgaagagcttgtgttcctcctagtagtggttccagaactggttcatgttatctattctaaactaataatcaatagatggacaaaagaaacaacaaccccaggagatgggacctgatcatgcaacctggcactggaaaagaaatcagcgggattttgggggtggggggggatgggaggtaccttagagggagtattttctttattttttgaagaaagtaagatcctgactctgaagcttcaaagtgacactgtggaaatctgaaacgaggggatgtcatgaaggcagcttttctttttctgaggaaaaaataggcatgggctacaggactatttaaaatgtctcatttacagtataaaactcaaaggtagatgtaatttttacacctatgagtatttgtccaatttctgtctcttcctcaccattgggtatctattctttatatgtaaataagataaggtcatctgatagccttattcagtcttcatcattttcatcattgttcctatgtagattattggacatttattgtagcactacataactgattataaaaatctgtaaatgaattagcactttcatattgaaacaagcctgctagcctatgtataaaatagcaaaatgtttgctgtttataaaaagatgtaatggggtggggggcaggggtaatttcaagttattaatttaaaaatgaactagcaattttgtacctggtgactttgtggtgcactcacctctgatagtgacttgaattcggtatgtaaaaaggggttagtggtatttcattgctgctaaaaatgacaactccctctgtgtcctgtttttcttaaagctgtcagtgtacaagtgggtatttgaataccagaccttactgtaaaaaataaaaaaggtggtatctagagcatgtaaattggatataaagttctgctcttaaagagttgatctaagagtatggctaaacatctatatatgcaatctattaaaagaacttaattcggctattatgtcttgatttgattgcagttttttcctaattataacaaatttttcctcattggcctgtttttaatcctgtgcctagaaggagtacaaaatgcacactttacaaaattgatatttaacacttacccactcccctttccccatctcttctaccgctcttgttgatcgtggtatctgatcttgactagataggctgaaggcacatggttccctccaaaaaccactattgataccactacaaaaacaagccagcaaaaagatactgtagagaggttggcttgcttccctctcttcctaactgcatgttgaaaaataagccgttattgatcttaaacatcggtcagatgagtcatacattgggttattttttatatacatgtatacacaaaatatttcaaattgaaagcaacatcttaatggattcaaaactattacaagctgttgtctaaaacaggtgagaaaaaaatttataactgtaaaaacaaatgcacatattgatatttaaaatgcgtaattaagaaaacccattgttgttgtgtttttcttgtataccaataattaagccactactgttggcactgtttggttttctattttaacactgaaggagtgaaagtatttcctatatttatgaatttactactaaaatcttggcaaaaaaagaaaaaaattgtctaacgtgtgtgggtgaaaactgttaatcaagtgtttctactcccccccgaaaatcccctgaaagttggacaccaactgtataccctaggttgcttaaagggatttcactattatataaagtcaataaaaatgaagtagttgtatatatgcaacattgtgtacagaggggaaataatgaatagtattaaagaaacattctcgtcttcctttacctttaatcccctaatacctagtctactttttaaattttcagacttcactgctttttgaattcataattctaattttcacattattgttaatggaaaatcatatctaataaaggttttagttattcccatgcacagtatgaaaattctcatttgctgaggttttgtttcaagaaaatgtattggcatgtctttgagaacatgttttattgtctcctgtgtcatataatccaaactaatctccgtttacagactttaacttgaaattagaccttataattaaactatttaaatagtgttcaaatgatagtttctaatgcatcaaatatatacctcagttttcatgatttcctttaacattataatttggtatagatcaagaatcttaacatgtatcagtttctagatgaggctgcaggatttttggaaaactttttgaatgtatttacaatattctcttgtaattagctacatagggacttgtctttttttctttttacatacagcttttcctacagttttattaccctgtaatttttttttagttgtagaagttaattctgattttgtgtggatttcagtatttgtctttgttaatggcacatattagcataaatcacttttgtaaatgtaagctttctttttttttcttgaaaaagcctttctatttatcagtattaaataaaggaagttaatctgtttctctgcaggtaataaaatagtgacacactgtattaagatagtgactgctatactcaactctggaagagactagagtatagagcatgagtggcaaaaccacagcccttgggccatatgctgctattcagtcccagatgtagcccctgaagcaagcataaagaaaaatgaattaaaaattaaattaatatggaaagttaaaaaatggattacattagtatgactaaaccatgtctttggcaaagatctaacacaatgtcttaagtataataggtagtctctgtttgtaaaataaatgacttaaatttaaaacatcaaaaaaaaaaaaaaaaaa

SEQ ID NO: 2451 - DNA, 1160 bp, Homo sapiens; identical to SEQ ID NO: 2285

SEQ ID NO: 2452 - DNA, 2376 bp, Homo sapiens
taggtgtggtctgggaaggctggggcggtggcaaggtggagggcgggggtgacagcagcccggagccgcggagcctcagcttccgcctggacccagcctcgtgggagccccgcgggtcctgcccagatgtggaagactgaggcctgttgaaagtgcagagctcagccctggcaccctctgttcccaagagctccatgcaggtgccacaggatggagaagaccttgctggccaaccttggtaccacggcctcctgtcccgccagaaggctgaagctcttcttcagcaaaatggcgacttcctggttcgcgcctctgggtcccgtgggggcaaccccgtgatctcctgccgctggcggggctcagccctccattttgaggtgttccgtgtggccctgcgtccccggccaggccgacccacagccctctttcaactggaggatgagcaattccccagcataccggctctggttcacagttatatgacaggcaggcgcccactgtcccaggccacaggggctgtggtctccaggcctgtgacttggcaggggcctctgcgacgcagctttagcgaggacaccctgatggatggcccagctcggatagagcctctcagggcaaggaagtggagcaacagtcagcctgcagatttggcacatatggggcggtcaagagaagaccccgctgggatggaagcctccaccatgcccatatctgccttgccccgaacgagcagtgacccggtgttgctgaaggcccctgctcccctgggaactgttgccgacagtctcagggcctccgatgggcagcttcaagccaaggcaccaacgaagcccccccggacaccctccttcgaactgcctgatgcctctgaacgtcccccgacgtactgcgagctggtgccccgagtgcccagtgtccagggaacatccccgagccaaagctgcccagagccagaggccccatggtgggaggccgaggaggatgaggaggaagagaatagatgttttacaagaccacaggctgagatctctttctgcccccatgatgccccctcctgcctgctgggcccccagaatcggcccctggaaccccaagtcctgcataccctccgtggcctgttcctggagcaccatcctgggagcaccgcccttcacctgctattggtagactgccaggccacaggcctcctgggagtgaccagagatcagcggggcaacatgggagtctcatctggcctggagctgctcactcttccccatggacaccacttgaggttggaactgctggagaggcatcagacactggcgctggccggggcgctggcggtgctgggctgctcggggccgctggaggagcgcgcagccgcactgaggggactggtagagctggcgctggcgctgcggccaggggcggcgggggacctgcccgggctggctgcagtcatgggcgccctgctcatgccccaggtgtcccggttggagcacacgtggcgccagctccgaaggagccacacggaggctgcgctggcctttgagcaggagctgaagccgctgatgcgggctctggatgagggcgctggaccctgcgaccccggcgaggtggcgctgccgcacgtggcacccatggttcgcctactggagggcgaggaagtcgcggggccgctggacgagagctgtgagcggctgttgcgcaccctgcacggggcgcgtcacatggtccgggacgcacccaaattccgcaaggtggcagcccagcgcctgcgaggattccggcctaacccggagctgagggaggccctgaccaccggcttcgtgcggaggctgctctggggtagccggggcgcgggagctccgcgcgctgaacgctttgagaagttccagcgcgtcctcggcgtcctgtcgcagcgcctggagcctgaccgctgagagcgcagacacccttcttcacacccgggacccccaggtttttgcgaaccccagaagagaccaaaggagtcgtcccaggctcctcgcgcctcaggtggaatcctgccctgtgcctcacagaagaggtggggaccgcagtcagggtcacctggaccatggtgaacatgtgacctgcagatctggcatcagaggccagagttcaaatgtgactccacctcttaaaagccgtgatttctagcagttgacttcacctctgtgtcggcctttaacaaaatcatagccatacagcagctcaggcctgtaatctcagcactttgggaggccgaggcggaaggaaggcttgaggccaggagttcaagaccagccagggcaacatggtgagacctcatctctacaaaaactgaaaaataaaaaacttttaaaaaatgtaaaaaaaaaaaaaaaaaaaaaa

SEQ ID NO: 2453 - DNA, 3363 bp, Homo sapiens
gacatagctgccctaaaaggaatgaggaagcgagagctctccagtgtctggctggctccgtccgtgtgacagcccatgatgttctttccggtctctgtaatattctgaatttccacctgcccgccccttcgcttataatgcagagcatgtgaagggagaccggctcggtctctctctctcccagtggactagaaggagcagagagttatgctgtttctcccattctttacagctcaccggatgtaaaagaactctggctagagaccctccaaggacagaggcacagccacacgggagtgaaatccacccctggacagtcagccgcaatactgatgaagctgagaagcagccacaatgcttcaaaaacactaaacgccaataatatggagacactaatcgaatgtcaatcagagggtgatatcaaggaacatcccctgttggcatcatgtgagagtgaagacagtatttgccagctcattgaagttaagaagagaaagaaggtgctgtcctggccctttctcatgagaaggctctcccctgcatcagatttttctggggctttggagacagacttgaaagcatcgctatttgatcagcccttgtcaattatctgcggtgacagtgacacactccccagacccatccaggacattctcactattctatgccttaaaggcccttcaacggaagggatattcaggagagcagccaacgagaaagcccgtaaggagctgaaggaggagctcaactctggggatgcggtggatctggagaggctccccgtgcacctcctcgctgtggtctttaaggacttcctcagaagtatcccccggaagctactttcaagcgacctctttgaggagtggatgggtgctctggagatgcaggacgaggaggacagaatcgaggccctgaaacaggttgcagataagctcccccggcccaacctcctgctactcaagcacttggtctatgtgctgcacctcatcagcaagaactctgaggtgaacaggatggactccagcaatctggccatctgcattggacccaacatgctcaccctggagaatgaccagagcctgtcatttgaagcccagaaggacctgaacaacaaggtgaagacactggtggaattcctcattgataactgctttgaaatatttggggagaacattccagtgcattccagtatcacttctgatgactccctggagcacactgacagttcagatgtgtcgaccctgcagaatgactcagcctacgacagcaacgaccctgatgtggaatccaacagcagcagtggcatcagctctcccagcaggcagccccaggtgcccatggccacagctgctggcttggatagcgcgggcccacaggatgcccgagaggtcagcccagagcccattgtgagcaccgtggccaggctgaaaagctccctcgcacagcccgataggagatactcagagcccagcatgccatcctcccaggagtgcctcgagagccgggtgacaaaccaaacactaacaaagagtgaaggggacttccccgtgccccgggtaggctctcgtttggaaagtgaggaggctgaagacccatttccagaggaggtcttccctgcagtgcaaggcaaaaccaagaggccggtggacctgaagatcaagaacttggccccgggttcggtgctcccgcgggcactggttctcaaagccttctccagcagctcgctggacgcgtcctctgacagctcgcccgtggcttctccttccagtcccaaaagaaatttcttcagcagacatcagtctttcaccacaaagacagagaaaggcaagcccagccgagaaattaaaaagcactccatgtctttcacctttgcccctcacaaaaaagtgctgaccaaaaacctcagcgcgggctctgggaaatcgcaagactttaccagggaccacgtcccgaggggtgtcagaaaggaaagccagcttgccggccgaatcgtgcaggaaaatgggtgtgaaacccacaaccaaacagcccgcggcttctgcctgagaccccacgccctctcggtggatgatgtgttccagggagctgactgggagaggcctggaagcccaccctcttatgaagaggccatgcagggcccggcagccagactagtggcctccgagagccagaccgtggggagcatgacggtggggagcatgagggcgaggatgctggaggcgcactgcctcctaccccctcttccacctgctcaccacgtagaggactcaagacacaggggcagcaaagagccactccctggccacggactctctcccctgcctgagcgatggaaacagagcagaactgtccatgcttctggggactctctggggcacgtgtctggcccagggagacctgagctcctcccgctgaggaccgtctccgagtccgtgcagaggaataagcgggactgtctcgtgcgacgatgtagccagccggtctttgaggctgaccaattccaatatgccaaagaatcgtatatttaggagggaggccatacgccatgccatagcttgtgctatctgtaaatatgagacttgtaaagaactgcctgtagattgtttttaaaaggtcttgaataagctccttgagaaagttgtggaaagccctcctcagtgaggatagctacaccatggccatggcgcatcagatagtctctgtgtacctggatttgtgcaatatgtaaaaatgtatcaaatgtattatagataaggtgttaggtgcaaaggatgtctaataatccctgcacacgttttgaacttgcagtgaagtacactgctgttccttgcttcctggggcacttttctcttggttagtgtttaaaaattatcttcgcttttttaatgtggcctcaaatgtcatgccaattttcacatcttccacaaactccatttagggagaaatgtttaaatctctggtataagtttactccataccagagtaaactatatattactctatataagcagtcttgcaataactaatcaccaccatagaagaaagaaacagactgcaaggaacagagttgagtgtctggagtcatcaaaggcattaaaaactccagtaaaagctggggccgtagcaaaaatcatgaaaaacacttcaacgtgtcctttcaatcatccaattaaatgtgggtagattaatgaaaatgtattacatcaatattaactcatctatagcactttgagtatctttgtagttcatgatatcctatcctataatgtggaggtaaatgattttatatgcattgggggtcatatataaaacttcaatgtaatttcactacaataaattgccttccttatttgaaagtaaaaa

SEQ ID NO: 2454 - DNA, 14734 bp, Homo sapiens
gaggctttcgactgagggctagcgaggggagcacggctggagcagggctggagcagggctggagcagggctggagcagggctgaagcagggccgcggaccccgcacgctcctgcgggccccgcggagccattgcggccgaggcctcggcaggcgccagcggagagctagccgcatcttcgggggcagcccggcagctgccggcggcgcggcgagagagcggctgacagaggggatgcgaggtcctccagcagcctgacctgagtgggttagtgatccagagaaaccagcaggccaacttggtcaggaaggttcgggaagctgttggagcagtgtggggaatttcccaccaggatgagtatgattggctgtgattttagatcgtaaagctgaaaattgaaatcatgaaagtagacaggactaaactgaagaagacacctactgaggctcctgcagactgcagagccttaatagacaaactcaaagtttgtaatgatgagcaacttctcttggaactgcagcagatcaaaacatggaacattggaaagtgcgagttatatcactgggtggacctgttggaccgcttcgatggaatactggcagatgctggacagacagtggagaatatgtcatggatgctcgtatgtgataggccagaaagagagcaactgaaaatgcttctcttggctgtgttgaacttcacagccttgctcattgagtacagcttttcccggcatctgtacagttccatagagcatttgacaactttattggcttcctctgatatgcaagtggtgctggcagtcctcaatctcctatatgtatttagcaaaagatcaaactacatcactcgtctgggatctgacaagaggaccccgctgctaactcggctacaacatttggcagagagctggggtggaaaggagaatggctttggacttgcagaatgttgcagagacttgcatatgatgaaatatccacccagtgcaactacactacactttgaattctatgcagatcctggggccgaggtcaaaattgagaaaaggacaactagtaacacactacattatattcacatagagcaacttgacaagatttcagaaagcccttctgaaatcatggaatctcttaccaaaatgtacagcattcctaaggataagcagatgctgttatttacacacatacgactggcccatggcttttctaatcacaggaagcgattgcaggcagttcaggccagactgcatgcaatatctatattagtgtattccaatgccttgcaggaatcagcaaacagtatcttgtataatggcttgatagaggagttggtagatgtccttcagataacggataagcagcttatggagattaaagcagcttctttacgaacattaacatcaattgtccacttggagagaactcccaaactcagcagtattattgactgtactggaactgcctcctaccatggatttttgccagtgcttgtaaggaactgtatccaggccatgattgatccttccatggatccataccctcaccagtttgccactgctctcttctcttttttataccatctggccagctacgatgctggtggtgaagccttggtctcctgtggaatgatggaagccttattgaaggtcataaagtttcttggcgatgaacaggaccagataacatttgtcaccagagccgtcagagtggttgaccttatcaccaacctggatatggcagcttttcaatcccatagtggactttctatcttcatttatagacttgagcatgaagtagatttgtgccgaaaagaatgtccgtttgtgatcaagccaaagatccagagacccaatactacacaagaaggagaggaaatggaaactgatatggatggagtccagtgtattccacaacgagcagcacttctgaaatccatgttgaatttcctcaagaaggccatccaagaccctgctttctcagatggcatacgacatgtgatggatggttctctgcctacctccctgaaacacatcatcagcaatgcagaatactatggcccatcactcttcctcctagctactgaagtggtgactgtgtttgtatttcaagaaccatcactgctctcctcactccaggacaatggattgacagatgtcatgctgcatgcactgcttatcaaagatgttcctgctacccgtgaagtccttggctccctcccaaatgtattcagtgcactctgtttgaatgcccgaggtcttcagtcttttgttcagtgtcagccttttgaacgcctcttcaaagttcttctgtctccagattacctcccagccatgcggaggaggagaagttctgatccccttggggatactgcatccaacctggggagtgctgtcgatgagctcatgagacatcagcccacccttaaaacagatgcaacgactgccatcatcaagttacttgaagaaatctgtaatcttggaagggaccccaaatacatctgtcagaagccatcaatccagaaggcagatggcactgccactgctcctcccccaaggtctaatcatgccgcagaagaagcctctagtgaggatgaggaggaagaggaagtacaggccatgcagagctttaattctacccagcaaaatgaaactgagcctaatcagcaggttgttggtacagaggaacgtattcctattcccctcatggattacatccttaatgtgatgaaatttgtggaatctattctgagcaacaatacaacagatgaccactgccaggaatttgtgaatcagaaaggactgttgcctttggttaccattttgggtcttcccaatctgcccattgactttcccacatctgctgcctgtcaggctgttgcaggtgtctgcaaatccatattgacactgtcacatgaacccaaagtccttcaagagggtctccttcagttggactccatcctctcctccctggagcccttacaccgccccattgaatcccctgggggctcagtgttgttgcgagaactggcttgcgcaggcaatgttgctgatgctaccctctcagcccaggccacacctctgctgcatgcactcactgctgcccatgcctacatcatgatgtttgttcatacttgcagagttggacagagtgaaattcgttccatctccgtaaaccagtggggctctcaattgggtctgagtgttttgagcaagctgagccagttatactgttccctggtgtgggaaagcactgtcctcctctctctgtgtaccccaaacagcctaccatctgggtgtgaatttggccaggcagatatgcagaaactggttccaaaggatgagaaggcaggtacgacccagggcggaaaaagatcagatggggaacaggatggagcagctggaagtatggatgcttctacccagggcttattagaaggcattgggctagatggtgacacattggctcccatggagacagatgaacctactgcttcagactctaagggcaaatctaaaatcacaccagcaatggctgccagaattaagcaaatcaagcctttgttatcagcttcctccagattaggccgagcacttgctgagctatttggacttcttgttaaactttgtgtgggatctcctgtccgccagagaaggagccatcatgctgccagcaccactacagcaccgacacctgccgcgcgatcaacagcctcagctctcactaagctcttgactaaggggttatcttggcagcccccaccatatacacctactccccgattcaggctgacattcttcatctgttcagttggtttcacatccccaatgctgtttgatgagaggaagtatccctaccacctcatgctgcaaaaatttctctgctccggaggccacaatgctctttttgaaactttcaactgggctctgtccatgggaggtaaagttcctgtttctgagggattggaacactcagacttgcctgatggcacaggagaattcctagatgcctggcttatgctggtggagaagatggtgaatcccaccacggtgcttgaatctccacattcgctgcctgccaaattgcctggaggtgtccagaactttccccagttcagtgcactgcgcttccttgtggtaactcagaaagcagcctttacttgcatcaaaaacttatggaaccggaaacccctgaaggtatatggtggacgaatggctgaatcgatgctggccattctatgccacatcctccgaggagaacctgtgattcgagagagactaagcaaggagaaggaggggtctcgaggagaagaggatacagggcaagaggaaggtggctcccgccgggaacctcaagtcaaccagcaacaactgcaacagctcatggacatgggcttcacaagggaacatgcaatggaggcactgttgaacaccagcaccatggagcaggccacagagtaccttttaacccaccctcctccaatcatgggaggagttgttcgggatctcagcatgtctgaagaggaccagatgatgagagcaattgctatgtctctgggacaggatattccaatggatcaaagggcagagtcacctgaggaagttgcttgccggaaggaggaagaggaacggaaagctcgggaaaagcaggaggaggaagaggctaaatgtctagagaagttccaggatgctgacccgttggaacaagatgagctccacactttcacagatactatgttgccaggctgcttccaccttcttgatgagctgccagacacagtataccgtgtgtgtgacctgatcatgacagcaatcaaacgtaatggagcagattatcgtgacatgattctgaagcaagtagtcaatcaggtgtgggaagctgctgatgtattgatcaaagctgctcttcccctgacaacaagtgacacaaaaaccgtgtcagagtggataagtcagatggccacactgccccaggcctccaatttggctactagaatcttgcttttaacgctactttttgaggagttgaagctaccttgtgcttgggtggttgaatcaagtggcatccttaatgtcctaatcaaactcttggaagtggttcagccctgcctccaggcagccaaggagcagaaggaagtccagaccccaaagtggatcacaccagtgttgctcctgattgatttctatgaaaagacagccatctcctcaaaaaggagagcccagatgactaagtacctgcaatccaacagcaacaactggcgctggtttgatgatcgctctgggcgttggtgtagttacagtgcaagcaacaatagcactattgattctgcctggaaatctggagagacaagcgtgcgattcactgcaggccgaagaagatacacggtccaattcactacaatggtgcaggttaatgaggaaacagggaaccgacgccctgtgatgctgactctcctcagggtacctcggctgaataaaaattcaaaaaacagcaatggacaggaactagagaagacgctggaagaaagcaaagaaatggatatcaaacgtaaagaaaataaaggcaatgatacccctttggccctagagagtacaaacactgaaaaggagacaagcctggaggaaacaaaaatcggggagatcctgatccagggcttgacagaagatatggtgactgttttaatccgggcctgcgtgagcatgctgggagtccctgtggacccagatactttgcatgccacccttcgtctctgtctgaggctcacccgggaccacaaatatgccatgatgtttgcagaactgaagagtacccgcatgatcttgaatttgacccagagctcaggcttcaatgggtttactcccctggtcacccttctcttaagacacatcattgaggacccctgtacccttcgtcataccatggaaaaggttgttcgctcagcagctacaagtggagctggtagcactacctctggtgttgtgtctggcagcctcggctctcgggagatcaactacatccttcgtgtccttgggccagccgcatgccgcaatccagacatattcacagaagtggccaactgctgtatccgcatcgcccttcctgcccctcgaggctcaggaactgcttcagatgatgaatttgagaatcttagaattaaaggccctaatgctgtacagctggtgaagaccacccctttgaagccctcacctctgcctgtcatccctgatactatcaaggaagtgatctatgatatgctgaatgctctggctgcataccatgctccagaggaagcagataaatctgatcctaaacctggggttatgacccaagaggttggccagctcctgcaagacatgggtgatgatgtataccagcagtaccggtcacttacgcgtcagagcagtgactttgatacgcagtcaggtttttccattaatagtcaggtctttgctgcagatggtgcctccactgagacttccgcatctgggacctcccaaggagaggcttcaactccagaggagtctcgagatgggaagaaagataaagaaggggaccgggcctctgaggaaggcaaacagaaaggcaagggcagcaaacctttaatgcctacctccactatccttcgtcttctggcagagttggtgaggtcctatgttggtattgctaccctgattgccaactacagctacactgtgggccagtctgaactgatcaaagaggactgcagtgtgctagcttttgttctggaccacctgctcccacatacccagaatgcagaagacaaggacacccctgccttggcccgcctgttcctcgcaagcctggctgctgcagggagtggcacagatgcccaggtggccctagtgaatgaagtaaaagcagcccttggacgggcactggctatggctgagagtacagagaaacatgccaggcttcaggcagtgatgtgtatcatcagtactatcatggagtcctgcccctccacctccagcttctacagcagtgccacagcgaagacccagcacaatggcatgaacaacatcattcggcttttcctgaagaagggactggttaatgacctggccagagtacctcacagcttagacctgtccagtcccaacatggccaacacagtcaatgctgctctgaagcctttggaaacactttcccggattgtgaaccagcccagtagcctttttggcagcaagagtgcttctagcaagaacaagtctgagcaggatgcccaaggagcctctcaagattccagtagcaaccagcaggacccaggcgagcctggggaagcagaagtgcaggaggaggatcatgatgtcactcagacagaggtggcagatggggatatcatggatggggaggctgaaaccgactcagtggtgattgctgggcagcctgaggtgctcagttcacaagagatgcaggttgagaatgagctggaggacctgatagatgagttgcttgagagggatggcggatctgggaacagtacaattatagtgagcagaagtggagaggatgaatcacaagaggacgtgctgatggatgaagctccttccaacctcagccaagcttccaccttgcaggccaaccgagaagattccatgaatatcctggaccctgaggatgaggaggagcacactcaggaagaggacagcagtggcagtaacgaggatgaggatgatagtcaggatgaagaggaggaggaggaggaagatgaggaagatgatcaggaggatgatgaaggtgaagagggagatgaagacgatgacgacgatggctctgagatggaattggatgaggattatcctgatatgaacgcttctcccttggtccgatttgagcgctttgaccgggaggatgatctcatcattgagtttgacaacatgttctccagtgctacagacatccccccatccccaggaaatatccctaccacccatccactgatggtgcgccatgcagaccacagttctctgacactgggcagtggctcttcaacaactcgtctcacccagggcatcgggcgcagtcagaggaccctaaggcagctgacggccaatactggccacaccattcatgttcactaccctgggaatcgccagcccaaccctcctcttatactgcagaggttgcttggtccctcagctgctgctgacatccttcagctgagcagcagccttcccctacaaagccggggtcgggcccgcctcctggtaggcaacgatgacgtccacatcatcgcccgttctgatgatgagctgctggatgactttttccatgatcagagcacagctaccagccaagcaggaaccctgtccagcatccccacagccctgacccgctggacagaagaatgcaaagttctcgatgctgagagcatgcatgactgtgtttcagtggttaaagtgtccattgtcaatcacctggaattcctgagggatgaggagctggaagaaaggcgagagaagcgcaggaaacaactggctgaggaagaaacaaagataactgataaaggcaaagaagataaggagaacagggatcagagtgcacagtgtactgcatctaagtcaaatgactccactgaacagaatctctcagatgggacgcctatgcctgacagctacccaacaaccccatcttcaactgatgcagctacatctgagtccaaggagacccttggcactctgcaatcctcacaacagcaaccaacactcccaaccccaccagctttgggagaggttcctcaggagctgcagtctccagctggagaagggggcagctctacacagctattgatgcctgtagagccagaggaattgggtcccacaaggccaagtggggaagcagaaacaactcagatggagttatccccagctcccactataacctcactttccccagagagagctgaggattctgatgcactgacggctgtcagcagtcagctagaaggctctcctatggatacaagcagcctggcttcctgtaccttagaggaggctgtgggtgacacttcagcagctggcagttctgagcagcccagagcaggcagctccactcctggggatgccccaccagctgtggcggaagtgcaaggcaggagtgatgggtcaggggaatctgcccagccacctgaggacagctccccacctgcatcctctgagagctcttccaccagagattctgccgtggccatttctggagcagattcccgaggaatcctagaagagccgttgccttcaacaagcagtgaagaagaagatccccttgcgggtatcagtctccctgaaggtgtggacccctcttttctggctgccctgcctgatgacatccgtcgggaagttctacagaaccagctaggcattcgtccaccaacccggactgccccctccacaaatagctcagcgcctgcagtggtggggaatcctggtgtgactgaagtgagccctgagtttctggctgccctgcctccagccattcaggaggaagtactggcacagcagagagctgagcagcagcgacgagaactagcacagaatgccagctcagacacccctatggaccctgtgaccttcatccagactctgccctcagacctgcgccgtagtgtcctagaggatatggaggacagtgtgttagctgtgatgccacctgacattgcagctgaggctcaagccctgagacgagagcaagaagcccggcagcgacagctcatgcatgagcgtctgtttgggcacagtagcacctccgcactctctgctattctccgaagcccggctttcaccagtcgcttaagtggcaaccgtggggtccagtatactcgccttgctgtgcagagaggtggcaccttccagatggggggtagcagcagccataacaggccttctggcagtaatgtagatactctcctccgcctccgaggacggctccttctggaccacgaagccctttcttgtctcttggtcctactttttgtggatgagccaaagctcaatactagccgtctacaccgagtactgagaaatctctgctaccatgcccagacccgccactgggtcatccgcagtctgctctccatcttgcagcgcagcagtgagagtgagctatgcattgaaacacccaaactcactacaagtgaggaaaagggcaaaaagtcgagcaagagctgtgggtcaagtagccatgagaaccgtcccctggacctgctacacaagatggagtcaaagagctccaaccagctttcctggctctcagtatccatggatgcagccctaggctgcaggactaatatatttcagatccagcgttcaggggggcgtaaacataccgagaagcatgcaagcggtggctccaccgtccacatccatccccaagctgctcctgttgtctgcagacacgttttggatacactcattcaattggccaaggtatttcccagccacttcacacagcagcggaccaaagaaacaaactgtgagagtgatcgggaaaggggcaataaggcctgtagcccatgctcctcacagtcctccagcagtggcatttgcacagacttctgggacttattggtaaaactggacaacatgaatgtcagccggaaaggcaagaactccgtgaagtcagtgccagtgagcgctggcggtgagggggaaacctctccatacagcctcgaggcctctccactggggcagctcatgaacatgttgtcacacccagtcatccgccggagctctctcttaactgagaaactcctcagactcctttctctcatctcaattgctctcccagaaaacaaggtgtcagaagcacaggctaattctggcagcggtgcttcctccaccaccactgccacctcaaccacatctaccaccaccaccactgccgcctccaccacgcccacaccccctactgcacccacccctgtcacttctgctccagccctggttgctgccacggctatttccaccattgtcgtagctgcttcgaccacagtgactacccccacgactgctaccactactgtttcaatttctcccactactaagggcagcaaatctccagcgaaggtgagtgatgggggcagcagcagtacagactttaagatggtgtcctctggcctcactgaaaaccagctacagctctctgtagaggtgttgacatcccactcttgttctgaggaaggcttagaggatgcagccaacgtactactgcagctctcccggggggactctgggacccgggacactgttctcaagctgctactgaatggagcccgccatctgggttataccctttgtaaacaaataggtaccctgctggccgagctgcgggaatacaacctcgagcagcagcggcgagcccaatgtgaaaccctctctcctgatggcctgcctgaggagcagccacagaccaccaagctgaagggcaaaatgcagagcaggtttgacatggctgagaatgtggtaattgtggcatctcagaagcgacctttgggtggccgggagctccagctgccttctatgtccatgttgacatccaagacatctacccagaagttcttcttgagggtactacaggtcatcatccagctccgggacgacacgcgccgggctaacaagaaagccaagcagacaggcaggctaggttcctccggtttaggctcagctagcagcatccaggcagctgttcggcagctggaggctgaggctgatgccattatacaaatggtacgtgagggtcaaagggcgcggagacagcaacaagcagcaacgtcggagtctagccagtcagaggcgtctgtccggagggaggaatcacccatggatgtggaccagccatctcccagtgctcaagatactcaatccattgcctccgatggaaccccacagggggagaaggaaaaggaagaaagaccacctgagttacccctgctcagcgagcagctgagtttggacgagctgtgggacatgcttggggagtgtctaaaggaactagaggaatcccatgaccagcatgcggtgctagtgctacagcctgctgtcgaggccttctttctggtccatgccacagagcgggagagcaagcctcctgtccgagacacccgtgagagccagctggcacacatcaaggacgagcctcctccactctcccctgcccccttaaccccagccacgccttcctcccttgacccattcttctcccgggagccctcatctatgcacatctcctcaagcctgccccctgacacacagaagttccttcgctttgcagagactcaccgcactgtgttaaaccagatcctacggcagtccacgacccaccttgctgatgggccttttgctgtcctggtagactacattcgtgtcctcgactttgatgtcaagcgcaaatatttccgccaagagctggagcgtttagatgaggggctccggaaagaagacatggctgtgcatgtccgtcgtgaccatgtgtttgaagactcctatcgtgagctgcatcgcaaatcccccgaagaaatgaagaatcgattgtatatagtatttgaaggagaagaagggcaggatgctggtgggctcctgcgggagtggtatatgatcatctctcgagagatgtttaaccctatgtatgccttgttccgtacctcacctggtgatcgagtcacctacaccatcaatccatcttcccactgcaaccccaaccacctcagctacttcaagtttgtcggacgcattgtggccaaagctgtatatgacaaccgtcttctggagtgctactttactcgatccttttacaaacacatcttgggcaagtcagtcagatatacagatatggagagtgaagattaccacttctaccaaggtctggtttatctgctggaaaatgatgtctccacactaggctatgacctcaccttcagcactgaggtccaagagtttggagtttgtgaagttcgtgacctcaaacccaatggggccaacatcttggtaacagaggagaataagaaggagtatgtacacctggtatgccagatgagaatgacaggagccatccgcaagcagttggcggctttcttagaaggcttctatgagatcattccaaagcgcctcatttccatcttcactgagcaggagttagagctgcttatatcaggactgcccaccattgacatcgatgatctgaaatccaacactgaataccacaagtaccagtccaactctattcagatccagtggttctggagagcattgcgttctttcgatcaagctgaccgtgccaagttcctccagtttgtcacgggtacttccaaggtacccctgcaaggctttgctgccctcgaaggcatgaatggcattcagaagtttcagatccatcgagatgacaggtccacagatcgcctgccttcagctcacacatgttttaatcagctggatctgcctgcctatgagagctttgagaagctccgccacatgctactgttggctatccaggagtgctctgaaggctttgggctggcctaataaggccctgcccaactccgtggggttttttttaccattgttggacctggggaggggggagttaaaaaaagaaccagaaagaaattgtcaaaaaccaataaatgaaatccaccaactcaccgtgtgtgtcccagctgccccatcttccccagcgcatacctgttcctcttctcattctctccccgccgcctgtttcctcaccttctctcccctttccatgccgtccatgatccccaccccatgtgttttaaaaaggcagtagcctttgcagggacctgtctgtcccaactgtttgaacagtgtgctcctcagattctgtgttcagaaggatttgctgcattgagacttgaaacctttggataggggaaaaaattatatatatatatatttttttgttctgtttgcatttcttaatttgtgcttggaatgtgttgatgtgcacagctaatgattcaatgcgagacaagattggcgtctgtgttgtggaggtttcaaataaagagcactcttcataactcacttttcacaatggagtttttttcaaacttaaaaaaaaaaacaaaaaactcttaagcacatgctaggcatctggagaaaagatggattctccaggaaaccatccctgccctacccgcttgcccacctgcctccaccactggtgcaacttcctccttcagagtcagtttctgcagtcaggagagatgagcagttcaccaggaattgggggtgggggcatctgttttttttttttagaatgggagctgcacttggggatggtgatggtgttagagattgcagcccaggacaaagcatcaccttgctcaaggggaacaaactgcagcaggttgtacaaaacattcagagagctcacttgacccaaccgagggttttacttggtgagcctttctagtagtcttgagtctggggctcagttttagatttttatttcattaatgtttgtttatttctaataaattttaataagcgagtaatttaactaggtcgccagaagaccattatttttgtttgtctatttttgttgtcgtcactccctctctcgtcatctgtctgccagtctgttcacagatcaccttgtagtcccttgtggtttttactccatccagtgcttaaagctgatctaaggacttcgatggttccagccttcaaagaaaaaataatttaataaaaatttagttagaaaaaataa

SEQ ID NO: 2455 - DNA, 5234 bp, Homo sapiens; identical to SEQ ID NO: 41

SEQ ID NO: 2456 - DNA, 4553 bp, Homo sapiens
gagccaggcgggggcggagggggaggctggcagcggagctttgaatagggaagttttgcaggggttacgtttgcagtcagtccggtgtttgcaaatattgtgtgggctccgcgcgctgcgggctgcgggagggtccggccgggcgtctctgcgagcctggagtttgcatgaaactttcacctgcgctccggggagactttcggctccggctcccaccgcgcgcctcgccgccctcgcgaccgcgggctccgtccaacccggcccgacatggacgtgctccccatgtgcagcatcttccaggagctccagatcgtgcacgagaccggctacttctcggcgctgccgtctctggaggagtactggcaacagacctgcctagagctggaacgttacctccagagcgagccctgctatgtttcagcctcagaaatcaaatttgacagccaggaagatctgtggaccaaaatcattctggctcgggagaaaaaggaggaatccgaactgaagatatcttccagtcctccagaggacactctcatcagcccgagcttttgttacaacttagagaccaacagcctgaactcagatgtcagcagcgaatcctctgacagctccgaggaactttctcccacggccaagtttacctccgaccccattggcgaagttttggtcagctcgggaaaattgagctcctctgtcacctccacgcctccatcttctccggaactgagcagggaaccttctcaactgtggggttgcgtgcccggggagctgccctcgccagggaaggtgcgcagcgggacttcggggaagccaggagaaaagccttacagatgctcatgggaagggtgtgagtggcgttttgcaagaagtgatgagttaaccaggcacttccgaaagcacaccggggccaagccttttaaatgctcccactgtgacaggtgtttttccaggtctgaccacctggccctgcacatgaagaggcacctctgagggagcagagaggtggatcctgtaggctaaaaggcttccaggctgagagccggccgtggaaggagggatgcgtgttccagccaaagcatgccgttctgcaccctacccagttgcctccagggcctctccttggaaggtcttttgagggctaaaaaggtcctgtaagaagcggcatagcacccgtggtgcatggtatgtgggtgaccctggactcgccactggtacccgcccttccgagcggcgcctaagcctttgccgtgagcatgcacactgagaatgctaatggttgggttgattgtatgttgaggatctattactgaccgtatgatgaggccaactttttttccttgtggttagcaagactgcaagagatggaaaaaaagtagtttgaatgttttgtgtgtaaggagtataccatgagatgagatgaccaccaatcatttccttggggggagggggtgtctgcaccttagaaaaaaaaagaaaaatcaaaaaaacaaaaaaacaaaaacaaaaaaagaaggaaaatcttggagggtgggcgtgggaactcaggaccccagagtggcgagtggtgtggggagggagagcctctctcccccttttctgtgtgagaggaactcttagtgtctggtgcagctattaaatgtgcaatgtgtcaagtagcttgttttacacgctacaacatagctcatttgtaacccattgtataagctgtgtatttacaaatataacacaacaatttaacttttccttagaatacaaaaagtcatgcatggtctggggaactatatgcttttccatttttaagtcaggactgcaatactgattccagttaatgagcagctaagatccaatctgtctaatacagtgaccccctagccatccgggcctggcaatatacaattttttttcccctccaagtttgtaacactccccttccagaaaggcattgtgcaacacaggattatttttaaatgattctgaatttgaattaactttttggagaattctgtgatgcccttagaagaaattggacacgtattgagtgtcacaaagctggggctgggaattgctggtctaatgtttcattagacttaagaacctaaaatttttctcagttgggtggataaaaccactaacgcttagaaactgttttctcatgcagctatgtttctcttatttatgccttgaggactaatttctggttttctagctgttaatgcactgttgaccttcataatggtgccttacgcaagcgatcccttctgtgggggtctcatacaggggtgtgggcgatgcatgctttattaaggctcttgtttcacctggcagtgtactgtatcaacgtataatacagaaaaaaaatctctttaaggtcctccttcacaaagacatagagtgaaactccctttacatgtcagtatttgttcaacactttaggcaacttgactgtcagtgttaaaatggaaaacaggaaaatggaaaaatctgaccaattctgccaccttgagactttcatatagaccttgcacaacaattgtatagatcacacaccggctgtatttaatatgtaacattttcacacatattaaagatacagaagtattaaaaaacccccaatgttaatgtatttgcttaaaaggcacaagtttcacatatctgtctagctatctgttggtaatacagaaagtatactacttttttaaaaaagtgggcagaattcttgtgtatgtatatttgtgtgtacagtatgtgtatgtgtgtatatatatatattatatatatagataatatataaatattttttttaaggagaaactagaatgtttagctagaaaattccacagcctgtgaagaaatatttcaaaatggccataaaggaggtaaaaatgaaaaccataacctaacttttatagaggctttatctttaatttaacgatgtgcggaggactttcttgcttgaatctgttccgggctgtctgctctgtccatcaaatgggcaggtctggaatggggcaccttcggccgttcagaagtggcctgaacagaatgctggaacccaggctggactcggacacactaaggttttgattttgaatttcagccttattagaagatctaacctaagagtaagctaaccacagggattcttttgtagaacactttttatgcagatgaagctattttttccagcaagtagattcttccagtttttccaaggagtaatttccccgaattggcataccacggcgtggacagctgatatttcacccagctgctggcttgtgggtgtggctctttgctttatatatatatacacacatgtgagtctggctgggctggtattttgtttgatcttcctggaaatgagcagtgactaacgctcacataactggttttttttttatctgggctgatgaatacatttacctaagaaactcatttcgttttacttaagaggggaagtgcagttttcttttggcagttcagaatccaagcacttgatttgctgggtttggaaaactccttttttggccttctatgtgcttagccataacaattccattaagcaagaaggtaagcaaaagacaaaaaaaaaaaaaggaaaaaaaaaaacttgcactggcttgtctcacttacgaaacatgtcggagctgtttgcctgggtggggctgggtaccgtacctgtcaatgcctgtgattttcataattagcacgtacataaagaagtacattctgttcaggtgataactgagcctcaatcaagcagaaactttttgcttgaaattaaaaaaaaatttctattagtgaaatttcttttttttttttttttggaagcaccctgttatctaaagaatctttgtaagatttttgtaaaattttgttttacaagattttatttgaaattgttttttgcaagattgttatatttctgtatgaatgtattttttattggaataacataaaagaattcttatcagcatcttgagtctggttgttttttttgggggaagggggttgttggaacagattcctcctgcattcatcaccctggcttcctcctgggggcaaatcttcattgagcaaccctgagaacaactcaccgacctcagccccttcctctttccacagcctgtcctgggagctggagaggatgtcagcgagcctgacattgccctccctgaatgcatcaaatactcttctccaaggactgacaaaaacaaccccccggctgtgggcacagtagggaaccatgccggtttgatcttccattgctcaagccagggaatgcattgcagaggcacctgcacaacgacaaacttgagtgtttccctgccacttctgtgcctccacagcctgctccagttccgcagctagagctgggcctaccttccccagccagccctgccacacacctggctgaggcatgtctgggaggggtggaggaggcagagggactccaggccagagggctgttctcacaacctcagcccactctcagtcaaggagggcagaaaataaaagatgacatcactgccaaaaaaaaaaaaaaaaaa

SEQ ID NO: 2457 - DNA, 11062 bp, Homo sapiens
gcagatcgggagcggtgccgagaaaaatttccttactagatgacatttcatcgcaatgtccgatcgtttggggcaaattaccaagggcaaggatgggaaaagcaagtactcgactctcagcctgtttgataagtataaaggaaaatcagtagacgcgattagatcctcagttattcctagacatggcttacagagtcttgggaaagttgctgcagcccggcgcatgccaccgcctgcaaacctgccaagcttgaagtctgaaaacaaaggaaacgaccccaacatcgtgatagtacccaaggacgggacgggatgggcaaacaagcaggatcagcaagacccaaagagttccagtgcgacggcctctcagccgccggagtcgctgccgcagccgggtttgcagaaatctgtctccaatttgcagaaaccgacacagtcaatcagtcaggagaatacaaattcagtgccaggtggaccaaagtcatgggcacagctgaatggaaagccagtaggacacgaaggtggtttaaggggctcaagccgactgttatccttctctcccgaggaatttccgacgctgaaagcagctggagggcaggacaaggctggcaaagaaaagggcgtcttagatctgtcgtatgggccaggaccaagcctccgccctcagaatgtgacaagctggagggagggcggtgggcgacacataatttctgccacgtctctgagcacctccccaactgagctgggcagcaggaactcgagtacgggagatggagccccctcctcggcatgtaccagcgattctaaggacccctctctccgcccggctcagcctgtccgaaaaggggcttcacagttcatgggaaatgtataccacccacctacataccatgacatgcttcctgcttttatgtgttcgccgaagtcatcagaaaaccagggtacagtggaacgaggctcttttccccttcctcagctccgccttgaacctcgagttccttttagacagttccagatgaatgaccaagacggaaaagaaaacaggctgggattgtctcgcccactccgcccactaaggcagctggtggagcgggcaccacggcccaccattatcaatgcggaaaacctgaagggccttgacgatctggacgccgatgccgatgatggctgggcaggcctccatgaagaagtggactattctgagaaactgaagttcagtgatgatgaagaggaggaagaagttgtgaaggacggcaggccaaagtggaacagttgggaccctaggaggcagcggcagttgtcaatgagctctgcagacagtgcggacgctaagcggactcgagaggaagggaaggactgggctgaagcagtgggtgcgtcccgtgtggtccgaaaggcgccagaccctcagccaccgcccaggaagcttcatggctgggcaccaggccctgactaccagaagtcatcaatgggcagcatgttccggcaacagtccatcgaggacaaggaggacaagcccccaccaaggcagaagttcattcagtcagagatgtccgaggcggtggagcgagcccgaaagcgccgggaagaagaggagcgccgagcccgggaggagaggctggccgcctgtgctgccaaactcaagcagctggaccagaagtgtaagcaggcacgaaaggcaggtgaggcccggaagcaggcagagaaggaagtgccctggtctccaagtgctgagaaggcatctccccaggaaaacggccctgctgtccacaaaggctccccagaattccctgcccaagagacccccaccacattcccagaagaggcacccacagtgtccccagcagtggcacagagcaacagcagtgaggaagaggccagagaggctgggtcccctgcacaggagttcaagtatcagaagtcccttcctccccgattccagcgccagcagcagcaacaacagcaggagcagctgtacaagatgcagcactggcagccggtgtaccccccgccgtcccacccccagcgcaccttttacccacaccacccccagatgttgggcttcgatcccaggtggatgatgatgccttcctacatggacccacgtatcacgcccactcggaccccggtggacttctacccctccgccctgcatccctcaggactgatgaagcccatgatgccccaggagtccctcaatgggacaggctgtcgctctgaggatcagaactgtgtgcccccactccaagaaagaaaagtgacccccatcgactcaccccctgtgtggagcccagagggctacatggcactgcagagcaagggctacccgctcccgcacccgaagtcgagtgacaccttggctatggacatgcgtgtcaggaatgaaagctctttctctgcctcactcggaagggcagggggcgtaagtgctcagcgcgatctctttgaggagagaggggaggagtacttgagtgcttttgacaagaaggcccaagcagactttgacagctgtatctcttctcaaagaataggccaggagcttttgtttccaccccaagaaaatgttcaggatgcaggtgctcctgggggtcacacccaaaacctcaggtgttccccattggagcctgactttgtcccagatgagaaaaagccagagtgtggcagttgggatgttagccaccagccagagaccgctgacacagcccatggtgttgagcgggagacaccccgggaggggacggcctttaacatctcctcctgggacaagaacgggagccccaacaaacagccatcctcggagcctgaatggactcccgagccccggagctccagcagccagcacccggagcagacgggcaggacccggaggtcgggacccatcaagaaaccagtcctgaaagccctcaaggtggaagacaaggagaaggagcttgagaagattaagcaggagctaggggaggagagtacccggctggccaaggagaaggagcagagccccacggcagaaaaggatgaggacgaagagaacgatgcctctctggccaactcctccaccaccactttggaggacaaaggccctggccatgccacttttggccgcgaggccaccaaatttgaagaggaggagaaacctgacaaggcctgggaagccagacccccacgagagtccagcgatgttccccccatgaagagaaataactggatctttattgatgaggagcaagcctttggggtcagaggacaggcccggggccggggccgtggtttcagagagttcacttttcgtggtcggcctgctggcggaaatgggagcggcctctgtggtgggggggtcctgggggcccgcagcatctactgcagcagtcagcgcagcggccgtggccggggcctgcgagagtttgcgcggccagaggactgccccagagccaagccccgacggagagttgccagtgagacccatagcgagggctcagagtatgaagaacttcccaagcgccgccggcagaggggctccgagaacgggaatgaaggctcgctcctggagagggaggagagcaccttgaagaagggcgactgcagagattcttggcggtccaacaaggggtgctctgaggaccacagcggtctagatgccaagagccgaggccctcgggcctttgggcgagccctccctccccggctgagcaattgcgggtatggacggagaaccttcgtctccaaagagtcaccccactggcagagcaaaagtccaggcagctcttggcaggaatatggcccttccgacacatgcggatcccggcgacctacagacagagactatgtcccagattcctacagacaccctgacgcatttggtggccggggctttgaggacagccgcgcggaggacaagagatccttcttccaagatgaacacgtggcagattctgaaaatgcagagaaccggcccttcaggagaaggcgccccccacgccaagataagccccctcgattccggcgcctccggcaagagcgggagtccctgggcctgtggggacccgaggaggagccccacctgctggcaggtcagtggccaggcaggcccaaactgtgttctggggacaagagtggcactgtgggccgcaggtcccctgagctctcctaccagaactcctccgatcacgccaatgaggagtgggagacggcctccgaaagcagcgacttcagcgagcggcgggagcggcgggaaggccctgggtccgagcccgactcccaggtggatggtggcctgtcgggggctagtttgggtgagaagaaggagctggccaagaggagcttctccagtcagagacccgtggttgacagacagagccgaaagctggagccgggagggtttggggagaagcccgttaggccaggtggtggtgacacctcccctcgctatgagagccaacagaatgggacgcctttgaaagtgaaaagatccccagacgaggccttgcctggaggtcttagtggctgcagcagtgggagtggccactccccctatgccctggagcgggcagcccatgccagtgctgaccttcccgaagcctccagtaaaaaggcagagaaggaggccaagttggctgctccgagggcaggtgaacagggagaggccatgaaacagtttgacctgaactatggaagtgccatcattgaaaattgcgggtccagccccggggaggagagtgaggtgggttctatggtgggcgaaggcttcatcgaagtcctgaccaagaagcagcgccgcctgctggaggaagagagaagaaagaaggagcaggccgtgcaggtgcctgtcaaaggtcgaggcctttcctcccgtattcctcctcgatttgcaaaaaagcagaacaacttatgtctggagcaaggtgacgtgaccgtgcctggcagcagcctgggcactgagatctgggagagcagcagccaggctctccctgtgcaggccccagccaacgactcctggaggaaagctgtcactgccttcagcagcaccgagactggctctgcggagcagggttttaagagcagccagggagatagtggcgttgacttgagtgccgagtctcgggagtcgtctgcgacctcctcgcagcgcagctccccatatgggactctgaagccagaggagatgagcgggcccggcctggcggaacccaaggccgacagccacaaggagcaggctccaaagccatctgagcagaaggattcagaacaaggctctggacagagcaaggagcacagaccaggacccatcggcaacgagcgttctctgaaaaacagaaagggctcggagggggccgagcggctgcaaggggctgtcgtcccgcctgttaacggggtggagattcacgtggactccgtgctgcctgtgccacccattgaatttggagtcagtccaaaagactccgatttcagcttgccacctggttctgcctctggtcctactgggagtccagttgttaaacttcaggatgccttggccagtaatgcagggttaacacagagtatccccatcctgcggcgggaccatcacatccagagggccatcggtctctccccaatgtccttccccaccgccgaccttactctgaagatggagtctgcgcgcaaggcttgggaaaactcccccagtttgccggagcagagctctccaggcggcgctggctcaggcatccagcctccatcctctgtgggtgcctccagcggggtcaactacagctccttcggtggagtgtccatgccacccatgcctgtggcctctgtagcaccttctgcttctatgccaggcagccacctcccgcccctgtacctggatggccatgtgtttgcaagtcagccccggctggttcctcaaacgatacctcagcagcagagttaccaacaggccgccgctgcccagcagatcccgatctcccttcacacatctctgcaggcacaagctcagcttggactgaggggtgggcttcctgtgtcccagtcccaggagatcttcagctccttgcagcccttcagatctcaggtgtacatgcaccccagcctgtcaccgcccagcaccatgatcctctctgggggcacagccttgaagcctccatactcggcgttcccaggcatgcagcccttggagatggtgaagccgcagtctggctcaccctaccagcccatgagcgggaaccaagccctggtctacgagggccagctcagccaggctgctggcctgggtgcctcccagatgttggactcccagctcccacagctgaccatgccactgcctcggtacggctccgggcagcagccactgatcctgccccagtctattcagctgccacctgggcagagcctctccgttggggccccccgaaggattcctccgcccgggtcccagccgccagtcctgaacaccagcagagagccctctcagatggagatgaaaggcttccactttgccgacagtaaacagaatgtcccttcaggaggccccgtgccatcgccacagacctacaggcctagctctgctagccccagtgggaagccctctggatcagcagttaacatgggctctgtgcagggacactacgtgcaacaggcaaaacaacgagtggatgagaaacccagcctgggagccgtgaagctgcaggaggccccctcggctgcctcccagatgaagcgaaccggagcgatcaagcctcgggctgtcaaagtggaggagagtaaggcctgacagtgcctggctgccacctcgcctctccctactgaggacggtgccgccatgcggcctcgacacagccgacactcgggagcctcaccagatccaccgtccaaatgcgtggcccagactgagagacctccctcctctccactcccgaaagctccgttgtcaaccagcttgcacccgtggatatatggcattgacccgcttgctttgatacgaaacaaaaaagcagacgactccttcatcccatctgctcctaccgtgactgtggagtgacgcctcctgtgcagtgcagatttgccctccctgcctcctccctgtcctgccgcgcagccagggcgccttctcagcagtgcttccggcccagccgcccatccctaggcacagtgatttggcagcagggtcattttactttgaggctttttgttttaaaatgtagccaaggtttttacaaaggggaaaggaaaagaaaacaaaaacgcaagctccatgtgtatagctgaacttttatatgtttcttgccagcccctccgctcccttccatctctagcctctgtcctgtttagtttgatacgtcactgcagtaccttaagaggtgactcttaagaatgcatcccctcctgattcctcagctggttcacccttgaggttatttgcaaaaagaaaaggaggttcttgagggcaccgattgcgagcattctggtgcctggctccccgcctgggaagcgatggggtgctcagagcagcaggcaggttgggggagggggggggtcatagttgggttccagctcctggcttgatgagcccagggcgcttacaggcagcccatgaagttgatgacagttttagcatgagaatcacacagggtccctgtcctgggctcctctaaagccagtggatgtgctgggcaccagagacaaatcatggagatggctgctggtggctcccaggttggcccagatggggtgagctgacataccacaggcccatcccaggccccgtgggctctgcttctggggctccataccctgccctgcaggggtgctgtgtttttcacacatttctttccctgaagccttctgtaacctgtcattttccttccttcctcttccggagcctgctgctttctctggacctgtctccacctcccacacagctcatcgtgaacaccacttggtgatggagggagtggacccgtgtgtggtccccaagtgaggccactgggagtttgtccttttcctcctttgcttcactcccagcagcagacccaggttgtcaggacaggagggcctgagctaagcagtaggcatcagtctcgtttgtcttcagacggcgggggcaggtccagggtgaggctgggtggagggctgaccaaggtccaaagggcctgcgcagcctccgggagggcagcttctccagccagaggcttgtgtgagccatcgtgtgctgggcttgtttttaagtaagaaacaaggaaatcactccagattctgtcattccaaggaaagggaaggggacagttcaggtttctcagctgttcttaggggtcactgagcgtctacctcctcctccagaggaggctggctcagaacacctagaggagggggccggggatgcaccccccaccagaggctgccttcagcgtctcacgggtgcaggacagcgctcaggcttgggctctaagctctgtgtctagtgtagaacatggggaaggagcatcttaggaactgctgaagtaacttcttactgctctcacaattctaaggaagcgggagaacggcctcctaccaacagcgcccaccccagagctgcctgggaaagggcagttttactgaaaggtgctttactgttcacctgcatctttcagcagctcccctcctgccctcacctggtcttttccctctttatcccaagcctttatgcttgagtcccttccccaggggctgcccacccgacagttccaggcattccctacctgagcttcttgtctgcttttccttctcccactgcaagcggctgcttgtggggcctgggatgagccctctctgtccccaccggccctccttgccaagccattcctgggtgagttcaggcctgcgggagccacacattcatctccacctggacacttgagccgcatggccagacccctcccacctgatgcggtggtgcgtgtgatttgtcaaaagaaagccttctggatgctgttaagatgtacccttcaggtgaacctggtatcagacccacagtacttgctgtttgagaaaaaataaaaacaaaaaggtcacctgttctccagcccttttctcttacctggtatttccttcctttctcctcccccaccccaaataaaaaaacaaaaaacactagaatttatttatatgtattgatgttgtaggtctaggtgaaaaaaaaagaagtaaatgtttcactgctctatttatatataatgtctgaattaattctgtgcaggaaaggccaggaaattgcatgtgaagttcggtgcagtcaccacctgtgtgtgacctgagctgcagtctcttcgctgagatgcaggttttaaatgagacttggggggctgagggcaggcctcaggcctcccagcgccccaacccctccttggtctaatgaaatgcagttcttagtgcagagatgttttaaggtgcaatatatctcttcctttcccgtggttttagagccaagctcaaggtagtaggacgtagggtcttattttgttttcaaacccccatcctcagagcgcagatacatgcagaggcttctgccaggataccacggggccttagtgggaacaggtggagaccagcacttccctttcctgctgctgaggtagggattggggggtcagaacccactcacttttgcctgttaaagttgccctcctgacgctggcagctctgccttggtcactggggatgcggctcgttgctcagccaccagtggccttgcggtattgtccaccatccactagagtgggatgaagtccagagtgtgggtatacatctcagatgcccatctacccactggggacttcaatgccagctgcatttggtttggttttcttaactgttggcttctccccacagcgttttttgtttttttttaaacattcatattgttttcaaacttggaattcatagacactctggctctaggttccttaagggggaaaacaaaagatgactttatttcacattcaagaaaatcagttcagttccaaagctgtggtccttccagccacttctagggacactggggaaccttgttaaacgttgacatcagtgctctccagccgtgctgtcaccctcctatcttctggatctgccttcgcgatggtcagtgacagcttctggaagctgagcacacacaggtgcacagccatgctgtggtctggcctgctacggcagcatggcagctctggtggagccttctcccttgccatttggttcccctgtgccaagtagctgcaggctgcccctcaaatcttcatttgtcccttttcacttcctgcagaacaagcctgggttagagggtctgctggaaatggcctttgaagaccaaggataccaggatgtgtgcactctgtcgtgttctgtgatgaatgggaaacgtaggcttccagaaagccagctctcttctgaaatgtgacggacctaagcaggaagtcatccaggacaggagtggctcagtgttggggatggacgctgtcgcccagccatgctccaccagggccaccaatgtgtagttggctggtggtcttcgggcatgtgagacctgctcttcactgtttccaccccacttggtggcctccaggatggtagtggcaccctcagagccccatcttcagcatgttctgaagcctcagagtggaaattcctgctaaggctctgtgtggacgcctttctcccgtgatctaaaggggacactgtactcaagcttttgacctcatgccttgtgtagtaaaaaaggatttgggggttttgtttggttcctgagagggttgtgttttgtttttgtttccttttgtttatgttttggcctttcctctttgtctttccatgtagaccagatatttgaaagggcagacgatggctagaggtgtaatgtgcagcttgtttatacggtattttgggaaacttaccttggatgggaaatcgaatcgtggattcaccaggccggtgctggcacactcaccctcgccctttccctccggttcagtacctattgtttctcctttcaaatatgtgattgtactagctctttccatatgaaagaattctccttatttaaataaaaaaagtttaaaaa

SEQ ID NO: 2458 - DNA, 2421 bp, Homo sapiens; identical to SEQ ID NO: 1060

SEQ ID NO: 2459 - DNA, 5209 bp, Homo sapiens
acctctactggggagacgaggaccccgaggttctggggggcgacgcgacctgcccgaagtgacaagggtcctgggccgcactgctccgccggggtctgcgctcctcggcggagcgggtgggaaggatgagtcctcggggtggagaaggaggagcgggtccccgggtaccgctcacccggccttaggagcccgggagcgcgcgtagggacgcggagttgaggctctccatctgcggccagggaaagggatacagtcccccgggcccctcccggccgctcggaacccaccccaggcgcgtccccgcgggcgcgcgctccaggcggggccgacgggctcggaggcgcgcgcccgctgccgggtccgccgcgcgcgctccctccgctcctctcccccgcccctcccgggcccgcgcgctcccagggtccgccgcgcgcgcgcctcgcgtcgctccccatccccgcccctcccgccgccaccccgcccccggccgggtaccctcgccggacccgagagagagcgccgccgccatcttagttgctgccgctgccttcagcaagacgctgctctgaggcggggagggcgccgcgtcctgagcgcgcggcccagcgtcacggcggcggcggcggcggctcctccttggacccccggagctccccgcgccgcggagcagctggccccaggcccctagagccccgagagctccgagagctccgctcggcgtcccgcgcgcctccctgccgctcccgccccgggctggcgatgctgcgccgccccgctcccgcgctggccccggccgcccggctgctgctggccgggctgctgtgcggcggcggggtctgggccgcgcgagttaacaagcacaagccctggctggagcccacctaccacggcatagtcacagagaacgacaacaccgtgctcctcgaccccccactgatcgcgctggataaagatgcgcctctgcgatttgcagagagttttgaggtgacagtcaccaaagaaggtgagatttgtggatttaaaattcacgggcagaatgtcccctttgatgcagtggtagtggataaatccactggtgagggagtcattcgctccaaagagaaactggactgtgagctgcagaaagactattcattcaccatccaggcctatgattgtgggaagggacctgatggcaccaacgtgaaaaagtctcataaagcaactgttcatattcaggtgaacgacgtgaatgagtacgcgcccgtgttcaaggagaagtcctacaaagccacggtcatcgaggggaagcagtacgacagcattttgagggtggaggccgtggatgccgactgctcccctcagttcagccagatttgcagctacgaaatcatcactccagacgtgccctttactgttgacaaagatggttatataaaaaacacagagaaattaaactacgggaaagaacatcaatataagctgaccgtcactgcctatgactgtgggaagaaaagagccacagaagatgttttggtgaagatcagcattaagcccacctgcacccctgggtggcaaggatggaacaacaggattgagtatgagccgggcaccggcgcgttggccgtctttccaaatatccacctggagacatgtgacgagccagtcgcctcagtacaggccacagtggagctagaaaccagccacatagggaaaggctgcgaccgagacacctactcagagaagtccctccaccggctctgtggtgcggccgcgggcactgccgagctgctgccatccccgagtggatccctcaactggaccatgggcctgcccaccgacaatggccacgacagcgaccaggtgtttgagttcaacggcacccaggcagtgaggatcccggatggcgtcgtgtcggtcagccccaaagagccgttcaccatctcggtgtggatgagacatgggccattcggcaggaagaaggagacaattctttgcagttctgataaaacagatatgaatcggcaccactactccctctatgtccacgggtgccggctgatcttcctcttccgtcaggatccttctgaggagaagaaatacagacctgcagagttccactggaagttgaatcaggtctgtgatgaggaatggcaccactacgtcctcaatgtagaattcccgagtgtgactctctatgtggatggcacgtcccacgagcccttctctgtgactgaggattacccgctccatccatccaagatagaaactcagctcgtggtgggggcttgctggcaagagttttcaggagttgaaaatgacaatgaaactgagcctgtgactgtggcctctgcaggtggcgacctgcacatgacccagtttttccgaggcaatctggctggcttaactctccgttccgggaaactcgcggataagaaggtgatcgactgtctgtatacctgcaaggaggggctggacctgcaggtcctcgaagacagtggcagaggcgtgcagatccaagcacaccccagccagttggtattgaccttggagggagaagacctcggggaattggataaggccatgcagcacatctcgtacctgaactcccggcagttccccacgcccggaattcgcagactcaaaatcaccagcacaatcaagtgttttaacgaggccacctgcatttcggtccccccggtagatggctacgtgatggttttacagcccgaggagcccaagatcagcctgagtggcgtccaccattttgcccgagcagcttctgaatttgaaagctcagaaggggtgttccttttccctgagcttcgcatcatcagcaccatcacgagagaagtggagcctgaaggggacggggctgaggaccccacagttcaagaatcactggtgtccgaggagatcgtgcacgacctggatacctgtgaggtcacggtggagggagaggagctgaaccacgagcaggagagcctggaggtggacatggcccgcctgcagcagaagggcattgaagtgagcagctctgaactgggcatgaccttcacaggcgtggacaccatggccagctacgaggaggttttgcacctgctgcgctatcggaactggcatgccaggtccttgcttgaccggaagtttaagctcatctgctcagagctgaatggccgctacatcagcaacgaatttaaggtggaggtgaatgtaatccacacggccaaccccatggaacacgccaaccacatggctgcccagccacagttcgtgcacccggaacaccgctcctttgttgacctgtcaggccacaacctggccaacccccacccgttcgcagtcgtccccagcactgcgacagttgtgatcgtggtgtgcgtcagcttcctggtgttcatgattatcctgggggtatttcggatccgggccgcacatcggcggaccatgcgggatcaggacaccgggaaggagaacgagatggactgggacgactctgccctgaccatcaccgtcaaccccatggagacctatgaggaccagcacagcagtgaggaggaggaggaagaggaagaggaagaggaaagcgaggacggcgaagaagaggatgacatcaccagcgccgagtcggagagcagcgaggaggaggagggggagcagggcgacccccagaacgcaacccggcagcagcagctggagtgggatgactccaccctcagctactgacccgtgcccccggccacctcggtttctgctttcgaagactctgctgccatccgttctcccagtcccaagggtccacgatgtacaaagtcatttcggccagtaggtgtgcagacccctccccgccacgatcgtcgctgtgcttggtgtgtaggaccctaggctccccgcccaccctctgcctggtcgcgctcttcagtcccacgaggagctgacacgtcctctctggccgccatccggctcgcacaggggcctcccagcgcctcaggccccgcgtttgtgtctggagtctccccccggggagaggacactggcccctcgcactccagaaaagccatgccagctgggctcgttgacaaagggtaaaacatgctcactcccacccggtaatcatttttttctttttttaaaaaaagtttttattttttccaaactagtgcatgtataaataatggcaggatggggggtactgtgtagatgattaactgactttttaatattttgtaaataaatcggattccttgtgtcctttgtgctagtgtaacccgggactggaatgtaaagtgaagttcggagctctgagcacgggctcttcccgccgggtcctccctccccagaccccagagggagaggcccaccccgcccagccccgccccagcccctgctcaggtctgagtatggctgggagtcgggggccacaggcctctagctgtgctgctcaagagactggatcagggtagctacaagtggccgggccttgcctttgggattctacctgttcctaatttggtgtggggtgcggggtccctggccccttttccacactcctcctccgacagcagctccctgggcagtggcctggtctcaccgtgtgcagccttgtggtttatgcttaaatgtacattttcctgctggtaaaaggagaaactgagaggtgtcctgcagaccggctgaccactccttttggagacggcaggaggcctgagcgatccgtactcagaacgtccaggagagacgcatggcccgaagtcaaagtgctggaattttccaaaacagcctgttctctcctctctcctccccagagcaccccctgccatcaggggggttgaaatccctctcccccaggagccctgctgctttgcttggtggtagggcaggagagcaaacaaacagtcatggtctaaaacccacatagcactttgctcttagttacatgtaaaattttagatttctaaaacaggtgggcaatcattttgaatactgttctgtgaccctgactgctagttctgaggacactggtggctgtgctatgtgtggccatcctccatgtcccgtccctgtagctgctctgtttagacagcggacagacgctcacgcccaggggatgtcctcacgctgtcgccgcgcggtttcccttcgcagatgtgtatactcatgataggtcagaaagtgtatccgctacaataaagttctggttctaactaactccaaaaaaaaaaaaaaaaaa

SEQ ID NO: 2460 - DNA, 4815 bp, Homo sapiens
tgcgcaggcgcagccggcgcgtttctccgggctacagccggcgccgccgcccgctagtccgccgcccggcgccatggcgggctgcgcggcgcgggctccgccgggctctgaggcgcgtctcagcctcgccaccttcctgctgggcgcctcggtgctcgcgctgccgctgctcacgcgcgccggcctgcagggccgcaccgggctggcgctctacgtggccgggctcaacgcgctgctgctgctgctctatcggccgcctcgctaccagatagccatccgagcttgtttcctggggtttgtgttcggctgcggcacgctgctaagttttagccagtcttcttggagtcactttggctggtacatgtgctccctgtcattgttccactattctgaatacttggtgacagcagtcaataatcccaaaagtctgtccttggattcctttctcctgaatcacagcctggagtatacagtagctgctctttcttcttggttagagttcacacttgaaaatatcttttggccagaactgaagcagattacctggctcagtgtcacagggctgctgatggtggtcttcggagaatgtctgaggaaggcggccatgtttacagctggctccaatttcaaccacgtggtacagaatgaaaaatcagatacacatactctggtgaccagtggagtgtacgcttggtttcggcatccttcttacgtcgggtggttttactggagtattggaactcaggtgatgctgtgtaaccccatctgcggcgtcagctatgccctgacagtgtggcgattcttccgcgatcgaacagaagaagaagaaatctcactaattcacttttttggagaggagtacctggagtataagaagagggtgcccacgggcctgcctttcataaagggggtcaaggtggacctgtgacgggcagtggccccggtgaccttggggcctccgaccctgtgcagcctgggacaaaactgtttccggttggccgctgccacatggattttcttaatcgttttatgtcattagtcactcttctggaatgtcactcaagaccaagcggtcagaaggcctgaggacccaaggccccactggagcagtctgtccttatgccgaatcaaggcggaacatgggtgaaagacgagtaaggggcaaatcacagcaatattccacagcgccctccagagttacctggggaggaccgaggccacacgccactgcccccgaggccagagtgtaagtaaaggataaccaggactcgctgggagagatggactctgtcctcagcaacactccacagcagaaaggggtagcaggtaccccttcttatcagcggtaaaaatgcatttacaacctttcatttaaccgaaaaacacagaccgctttaacctctttatttctgtcccccactgcatgaacatctatacaattttaaaaatacttcctcataggatgctttggcccttcatctatttaatcatagctacatacctattttttataagtagcagtacacattcaaaggggtattcctagctcaatgcttggtgttctagttcaacttttatcctgcagcaagtaagcctagataactctacacgatttggctgagtggctttgtgtgaccgtggccccaggccaaggggatcatggccctggctggctttcccgggggtctcagctcctgttgtcagtgataggcggctcaaaggagcatcagtttcttttgatccaagaagtgcttactgaatgcctgccctgtgcgtggccttaaacattgagaagtgctgctctccgtttatttgggatttgattctcattttaccatagcttatattctcaatttcaatgccagtctcagaactcttgttttctgtgttctgttctcaaaattacattgtccctcatgtcatttcaaactgttttccaaagggatttgagcatatacaactacaaatccaagcagattgactctcaaaaataatcttaaatactgcaaatagtcccaactaagattcagtcagtatgtttgttttgcaagtttgggagagtaagttggctttgagtcacacatcgaagctttaagaggtgagacgctggcttcattctggactagacaggaacttggcctcagcgtgagatcctgccatgcagtgttgcggtggcactgaagaagtgtgaatgtgaaggcggcgtcggcgcggggccagagcaccactctgctgccccaccacgcggcctgtgaggagccactaaacctttccgtgcctagacctccccatctgtggaatggggtcaataccacctacctcacaggggtgttgtgaggactgagaagaacaatgtcaaatgtttttaatactcagatgtgggagcgacatcaatgaaatctgtactgtatgaaagctacacaaaaatgggcagacatttggttaattgtgccagatacctaaaatgtatgttcagaaaagcattttatcaactcagaaatatgacttatttctagatttcatggcttaatgaattttttcattgttatatataccaaagaggcttacgggttcattgattggtttgaaaaccagacagacggccgggcgcggtggctcacgcctgtaatcccagcaatttgggaggccaaggcgggtggatcatgaggtcaggcgttcgagaccagcctggccaacatgataaaaccccgtctctactaaaaatacaaaaaaatagctgggcgtgctggcgggtgcctgtaatcccagctactcaggaggctgagacaggagaatcctttgaacccaggaggcggaggttgcagtgagttgagatcgggcctttgcacttcagtctgggcaacagggcgagactccatctcaaaaaacaacaacaacaacaaaaaaaaccggacggacttgcccatcggccctcacgacacgcgtgcagtgggactctagccaaggcggtggccgagccatcattacaatttttctggagtaaaggatccacggtgggacatcaactggcacttactctgtttaggaacttgagttgaatcatttctaaacttgtcctttagaccacgcctagggcagcaaattccacttcctagaactgcaaaccgggagaggatgtagttagattctggcatcctgccccggctctttgagggaaaagttctttcccctgctctaagtagggcgggcccagcctccattcccattgggagccatgaagttgtcttgttgataggtctagggcagctgttggcagctgctggccttgtggatggtaagctgactgtgttggcatttaatgccatcctccatctgccagaggcccaggaagcccaccttcacaccaggcccaccagctggaaggagcccaggaggcaggtcttagggtttcatggtgaaatgctgtctgacaccagggaaaacttgacgtactctgctttggagaggaattccaggggtagggatggtgggagaacattcccaccctgtttataatcccagagcagaagtcagcaattacttagggataaaagatgaactccattttttttattttcttaagacagtcttgctctgtggcccaggctggaggctggagtgcagtggcaccatttcggctcaccgcaacctctgcctcccgggttcaagcgattctcctgcctcagcctcctgagtagctgggattacaggcttgggccaccatgcccagctaatttttttgtatttttagtagagacggggtttcaccatgatggccaggctggtctcgaactcctgacctcaagtgatccacgcgcctcggcctcccaaagtgctgggattacaggcgtgagccaccacgcccagccaagatgaactccttaaggacaggatttggtaagtgattgacttctttttagttccatgatcttgagattatttttagctttataaatttagcagtggcagggcccgtggagaatcaggttaatgaggtaaaggctttctgggtatttgctgccaaggccacatcaccaattttctcgatttaaaaaactgtcaagagatttatttttccattgcaggttttaaagtggagattctgaagtggaaaataggtactgtcagaacaaagctacctggaaacagcatagagtgaagcctttcgtgagggcttgcaggccgctgctgagtggcagtttacagaagaggtcgcggggtgagcctcttagcaggacagaaaacaaggcagcagcgcacctgccaccccttcacgagctgctccttgagcctaaaaagtaggctttattcatcccttctgttcatttaccaacctgggggattgatacgaccggggaaaatgttcctaaaccaggaagctgcgttagccgatcaggctttgtaagatctcgccaacagctagctgcttaggagtacccccacgatacgcacagcacaccactgtcccttcactgcactttcttcctgccttaggtagttgggcttgcccaccctagtttgcttttgtagtggtttggcaaggttagaaggcctcggcctctctgtcatgctgggaagtgcctactctctgggccactgctgcagaggccgtggcacttgtcatgggtttggaagacccagccatctgcagcagaggcagcctatcccattgcaaggagaggaactgaacggagtaattattctactcttctttttacataaatgtttatttaaatattctaaattggattttctttcacagatactgattattctttccagttcttaaataaaactgcacttgatttcactcaa

SEQ ID NO: 2461 - DNA, 2730 bp, Homo sapiens
ttccggtctgggacggagctgtagcggcactgtaactgcgagggcagcgccgcgtgtgtaacggcgggggcgtgtcggcgggaaggacaatcgggccgggactcgcggtgtccgggtgaccgcggcttcccgggagcagacctctgtgggcactgtgaggcggaacggagcggcggggcaggagctgttctgggcagccttcatcccgcgtggagtctacccccaagcccttctcctcttcccaattcttgtcaccttcgaggaggccatggaaaccccaacacctttgccgcctgtacccgcctccccgacctgcaacccagccccacggacaatccagatcgagttcccacagcatagctcgtctctgctggaatctctgaaccgccacaggctagagggaaagttctgtgatgtgtccctcctggtgcagggccgggaacttagggctcataaagcagtgttagctgctgcctctccttacttccatgacaagctgcttctgggggatgcgcctcgtctcactctaccgagtgtcattgaagccgatgccttcgaggggctgctccagctcatttattcagggcgtctccgcctgccactggatgctcttcctgctcatctccttgtggccagtggccttcaaatgtggcaggtagtagatcagtgctcagaaattcttagagaattagaaacttcaggtggtggaatttcagcccgtggaggaaactcctaccatgcccttctttccactacatcctctacaggaggctggtgcattcgctcttcgcctttccagaccccagtacagtcctctgcttctactgaaagccctgcttccactgagagccctgtgggaggggagggaagtgaactgggagaagtgctgcaaattcaggtggaagaagaagaggaggaggaggaagatgatgatgatgaggaccaggggtcagccacactctctcagactcctcagccccagagagtatcaggggtttttccccgtcctcatggaccccacccactgcccatgactgctactccccgaaagcttccagagggtgagagtgcaccacttgagcttcctgcccctcctgcactgccccccaaaatcttctacattaagcaggaacccttcgagcctaaggaggagatatcaggaagcggaactcagcctggaggagcaaaggaggaaaccaaagtgttttctggaggggacactgaagggaatggggagctagggttcttgttgccttcagggccagggccaacatctgggggagggggtccatcctggaaaccagtggatcttcatgggaatgaaatcctgtcagggggtggaggacctgggggagcaggccaggccgtgcatgggcctgtgaagctaggggggacaccccctgcagatggaaaacgctttggttgcctgtgtgggaagcggtttgcagtgaagccaaagcgtgaccggcacatcatgctgaccttcagccttcggccttttggctgtggcatctgcaacaagcgcttcaagctgaagcaccatctgacagagcacatgaagacccatgctggagccctgcatgcctgtccccactgtggccgtcggttccgagtccatgcctgttttctccgccaccgggacctatgcaagggccagggctgggccactgcccactggacttacaagtgactgctgaggctatacactagcttctagaacaagataaccactgctgctgatggatacttttccctcactgccatggcacaccagtcatggatcttgtaatcatgccaagagaatagatacattatggacctcttgttcttagatatgggcctctcagcctggcagatgtggaaactcaaatttctcgtcccactccaggttttggctagccaaccctgcaggaaagtggtttataggccattcatacttaagttgatcacttgcccatggtggacatttttgtggtggtgatgtccattaaggaaaccagattttcaattatttagtgagagaagagttagagcaaaagacagtggtaaatgttttattccgtctccatgaggaattgaaggagttggtctccacctagagatacatttgatttacagcttaagtaattcagaggctaagctctaagcttttttctctcattgctggaatgatttaagcagaagtccttttgtgtacttttaaaattgtatctttccaggagcccctcagattgtaccttgctttctcaccaatagacaccttcccgacacttttttaatgttgtagctgagcactttaacaagttgagcattccatgtttcattcttagaaccttctttaatagagggtcttccctcaacagcctgtgcctctggtctacctttgaccaccactgataactaatatattggtcacaatgactggaatgtgactagtgatctcaggagatggcactgtcctaaagtgctgtcagggtggcaccactgctctctgaacaacttaccttggtcagagggactcaggtttgggacagcacaagctgaaggctggagagtaacttgcatagtaggaccatacctcttcctttcccatcccacccacatatgatagacagcccctctgttgagatatggaggggacagatactggaatcgggggtgggacttgcagttacttaaaattttttaataaactgtgccctgaaacctaaaaaaaaaaaaaaaaaaaaa

SEQ ID NO: 2462 - DNA, 5758 bp, Homo sapiens; identical to SEQ ID NO: 2168

SEQ ID NO: 2463 - DNA, 6095 bp, Homo sapiens; identical to SEQ ID NO: 1527

SEQ ID NO: 2464 - DNA, 1074 bp, Homo sapiens
aaatttcctttcactttcggtctctggctgtcacccggcttggccccttccacacccaactggggcaagcctgacccggcgacaggaggcatgaggggcccccggccgaaatgacagtgctggcgccagcctggagcccaacaacctatctcctcctgctgctgctgctgagctcgggactcagtgggacccaggactgctccttccaacacagccccatctcctccgacttcgctgtcaaaatccgtgagctgtctgactacctgcttcaagattacccagtcaccgtggcctccaacctgcaggacgaggagctctgcgggggcctctggcggctggtcctggcacagcgctggatggagcggctcaagactgtcgctgggtccaagatgcaaggcttgctggagcgcgtgaacacggagatacactttgtcaccaaatgtgcctttcagcccccccccagctgtcttcgcttcgtccagaccaacatctcccgcctcctgcaggagacctccgagcagctggtggcgctgaagccctggatcactcgccagaacttctcccggtgcctggagctgcagtgtcagcccgactcctcaaccctgccacccccatggagtccccggcccctggaggccacagccccgacagccccgcagccccctctgctcctcctactgctgctgcccgtgggcctcctgctgctggccgctgcctggtgcctgcactggcagaggacgcggcggaggacaccccgccctggggagcaggtgccccccgtccccagtccccaggacctgctgcttgtggagcactgacctggccaaggcctcatcctggggaggatactgaggcacacagaggggagtcaccagccagaggatgcatagcctggacacagaggaagttggctagaggccggtcccttccttgggcccctctcattccctccccagaatggaggcaacgccagaatccagcaccggccccatttacccaactctgtacaaagcccttgtccccatgaaattgtatataaatcatccttttctaccaaaaaaaaaaaaaaaaaaa

SEQ ID NO: 2465 - DNA, 1447 bp, Homo sapiens; identical to SEQ ID NO: 2400

SEQ ID NO: 2466 - DNA, 6906 bp, Homo sapiens
aagccaacaggcgagtggcgaaggtggcggcagcggcggcgggggcagtcaccggctagggcgacggctccgaggccgagtggcggtccgacagagtcctccgtgtcctcccccgcatgacccccttgtgatcagcctttgagcctttcccacattgaagatggtgaaactagatattcatactctggctcatcacctcaagcaggaacgcttatatgtaaactctgagaaacagctcattcagaggctcaatgcagatgtacttaagacagctgaaaagttgtatcgtacagcatggattgcgaagcaacagagaatcaatttggatcggcttatcataaccagtgctgaagcttcccctgctgaatgttgccaacatgccaaaattttggaagatacacaatttgttgatgggtataagcaattgggatttcaggagactgcttatggagaattcttgagtcgattgagggaaaatcctcgtcttattgcctcctctttggttgctggagagaaacttaatcaggagaacacacaaagtgttatttacacagtttttacctccctgtatggcaattgcatcatgcaagaagatgaaagctacctccttcaggttttgcgatacttgattgaatttgaacttaaagaaagtgacaaccctaggcgacttttgaggagaggaacttgtgccttcagcatcttatttaaacttttttctgaaggactgttttctgccaaacttttcctcacagccactttacatgagccaattatgcaactgcttgttgaagatgaagatcacctggaaacagatccaaacaagctaattgagaggttctctccatctcagcaggaaaaactctttggagagaagggctcagatagattcaggcaaaaagttcaagaaatggtggagtccaatgaagcaaagctagtggctttggtgaacaaatttattggttatctcaaacagaacacatattgttttccacatagtttaaggtggatcgtgtctcagatgtacaaaaccctctcctgtgtagataggctggaagttggggaggtcagggcaatgtgtactgatctcctgttggcctgcttcatttgtcctgcagttgtcaatccagaacaatatggaataatttccgatgctcctattaatgaagtagcacgatttaatctgatgcaggtaggccgccttttgcagcagttagcaatgactggctctgaagagggagatccccgaacaaagagcagccttggaaagtttgacaaaagctgtgttgccgctttccttgatgttgtgattgggggccgtgcagtggagacccctccattgtcttccgtcaatcttctggaaggattgagcagaactgtggtttatataacctacagtcagcttattactctggtgaattttatgaagagtgtgatgtctggagatcaactgagagaagatagaatggctcttgacaatttattggcaaacctacccccggccaagccaggaaaaagtagcagtttagaaatgactccctacaatacacctcagctatctccagcaaccactccagcaaataaaaagaatcgattacctatagcaactcggagcagaagccgcaccaatatgctaatggacctacatatggaccatgaaggatcatctcaagaaaccatccaggaggtgcaaccagaagaggtgttggtcatttccttaggtacaggtccccagcttactccagggatgatgtcagaaaatgaggtcctaaacatgcagctttcggatggaggacaaggagatgtccctgttgatgaaaacaaactccatggtaaacctgataaaaccttgcgcttttccctctgcagtgataatctggaaggaatatctgaaggtccttcaaatcgctccaattcagtgtcctccctagacctagaaggagagtctgtgtcagaacttggagcaggaccttctggcagtaatggagttgaagctctacagctgttagaacatgagcaagctacaacacaggataaccttgatgataagctaaggaagtttgaaattcgtgacatgatgggattaacagatgatagggacatatcagaaacagtgagtgagacctggagtacagacgtcttgggaagtgactttgaccctaatattgatgaagatcgcttgcaagaaattgcaggtgctgcagcagagaacatgttaggcagtttgctgtgcctcccaggttcagggtcagtgcttcttgacccctgcactggttctaccatatcagagacaacaagtgaagcttggagtgtagaggtattgccaagtgactcagaggccccagacctaaagcaggaggagcgtctgcaagaactggagagctgttctggactgggtagcacatctgatgatacggatgtcagggaggtcagttcccgccccagcacaccaggcctcagtgttgtgtccggcataagtgcaacctctgaggatattcccaataagattgaagacctgagatctgagtgcagctctgattttgggggtaaagattctgtcactagtccagacatggatgaaataactcacgattttctttatatacttcagccaaaacaacattttcaacacattgaagcagaagcagacatgagaatccagctgtcttctagtgcccaccagctgacctctcctccttctcagtcagagtctctgctggccatgtttgatccactgtcttcacatgaaggggcttctgctgtggtaaggccaaaggttcactatgctaggccatcgcatccaccaccagatcccccaatcctggaaggagctgtgggaggaaatgaggccaggttgccaaactttggttcccatgttttaactccagctgaaatggaggcattcaagcaaaggcattcttaccctgagagactagttcgaagcaggagctctgatatagtatcttctgtccggagacccatgagtgaccccagctggaaccggcgtccaggaaatgaagagcgagaactccctccagctgcagccattggtgctacttctttggtggctgcacctcattcatcatcttcatccccgagtaaggactcctcaagaggagagactgaagaacgcaaagatagcgatgatgagaaatcagacaggaacagaccttggtggagaaaacgttttgtttcagccatgcctaaagctcctataccatttagaaagaaagaaaaacaagaaaaagacaaagatgatctggggcctgacagattctcaacactcacagatgatcccagccctagactcagtgcacaagctcaggtggctgaggatattctggacaaatacaggaatgccattaaacggaccagccccagtgatggagcaatggcaaactatgaaagtacagaggttatgggtgatggtgaaagtgcacatgattctccccgtgacgaagcactgcagaacatctcggctgatgatctcccagactctgcaagccaagcagcccacccgcaggattcagctttctcttacagagatgcaaaaaagaaactgaggcttgctctttgctctgcggactctgttgccttcccagtgctgacccattcaacaaggaatggtttaccagaccacacagacccagaagacaatgaaattgtatgcttcttaaaagttcaaatagctgaagcaattaatttacaagataagaatctaatggctcaacttcaagaaacaatgcgctgtgtgtgccgttttgataataggacttgtaggaaactgctggcttcgattgctgaggactacagaaaaagagccccatatattgcttatctcactcgttgtcgacaaggactacagaccacacaggctcacctggaaaggctattgcaaagagttttgcgggacaaagaagtggccaatcgatactttaccactgtctgtgtgagattactgcttgagagcaaagaaaagaagatcagggaattcattcaagactttcagaaactcaccgcagctgacgataaaactgctcaggtagaagattttctgcagtttctttatggtgcaatggcccaggatgtcatatggcaaaacgcgagtgaagaacagcttcaagatgcacagctggccattgagcgaagcgtgatgaaccggattttcaagctcgccttctaccctaatcaagatggggacatacttcgcgaccaggttcttcatgaacatatccagagattgtctaaagtagtgactgcaaatcacagagctcttcagataccagaggtttatcttcgagaagcaccatggccatctgcacaatcagaaatcaggacaataagtgcttataaaaccccccgggacaaagtgcagtgcatcctgagaatgtgctctacgattatgaacctcctgagcctggccaatgaggactctgtccctggagcggatgactttgttcctgtgttggtgtttgtgttgataaaggcaaatccaccctgtttgctgtctactgtgcagtatatcagtagcttttatgctagctgtctgtctggagaggagtcctattggtggatgcagttcacagcagcagtagaattcattaaaaccatcgatgaccgaaagtgaccaagaccaaggcccaccaaggcagcagactgttaatcagacaaacagatctctgagaaggtgcatcagctgctttgaaggctgaagattgttttgtatgatactgcacagcatcaggcattttaaagcagatctttactaaacaggttaatgagctaacaagcaggttctctcgtctttgggctctttcctttctgagttgcatattctattttcttgtccccaagtagagactagtactacaaaaagggaccacatttttcaagtatttctaagtataaaaaacaaaacaaaaatctcttaggaaatgtctagacctccattcttggattccctttctttccttttattttaaaaaagaacagtacccctcttttaagatgctgtcttacattaatgagcatctaatggaaagaaggtatgagttgcactgaggattagaatagtggtgcgttagtggcattatctataaatacactcacctaaattgaaagctaagaaggaaatgtaaatataatatatatttatatttgatgtaatatggacatctgcagattctaataaacaaggactattgctgatagtaggctgtgacatactgtcttgtgaaatggtttccttgacaaaatttaagctgagcttaaaagcaaaaaacaaaaagtacacagaaatatttattaaaatgtaatacagtttattgaactttctaggtatggagtttgatggacagggctgcctttaatgagtgtgaaggtcactaagtcacttagacatctcaccgtggaagtttgtgagcctgcattaggagatagactgattaccatacatgacataaaaaggaacagtggatagctcatactttatggtggttcttctcctccgaaataatatactgcagaaatcccagacagagctccttacaaacctttaattgtaatatatttttgatgattattcacattgaatgcacagaccaagaattcagtgaatgtcattttttaaaaaactaatttgtattgtctgctctagtgatacaagttttactagtgataaactattttaatcaaccatactattcttatggaaaaaaatatctattttggcaggtttctgtgcctttatttccctcttctgaaaaaaagtctgtgttttcatagtttggtttgcattgtatatcaataattaatcaggaatgggttttggtgcctgaaaaattggccatggaggcacaccaaagcttcaagcacaagtcttgtacatgggccatcactgtctggtttcacttcgtgtgtttcctaaacacatttagctgcttttttaacaaactcagccccatacttgagtcccttgttgttgggagcatttccaggcatcttttaagggaactgtgacaaacagcctcgggcagatgaacacggaggctctctgttgtctgtctctgagatctttgtgtctgggaatgcctaaagattttatttttttttctttgtttttattttattttattttatttttttgagacagagtctcaccctgttgcccaggctggagtgcaatggtgcgatcttggctcactgcaacctccacctcccagttcaagtgattcccctgcctcagcctcgcgagtagctaggactacaggcgcatgtcaccaagcccggctaatttttgtatttttagtagaaacggggtttcaccatgttggccaggatgatcctcaatctcctgacctcgtgatccacccgccttggcctcccaaagtgcgggattacaagcgtgaaccaccctgcccagccagaaactagattttctttatgcctccaccccttcttattcatttactttacaataccaaaataacaaattgcataggagtgtgggatgtggtttctgccttctagagagagatcagaattaaactagtactatgaaatgtccttttgaatgttaggtcaagaaatccatgtacagagtcgtgcacttcattggctgtaactgtcaaacttgccttgtattagaagttaaatcccatcgtaaatacatcacgaggccagctgtgtgatttctgagacctagatgagagtccatttacttcagcctttgattcagtaaatgttaagcagcagaagacttcgaatggttgaaattcattgttacaggatttaactcataaaccaatgagagattttttttttctctgcaatggttgctaagtctattccatgttaacactgtggaaataaatatgaagatgtggacattgcaaaaaaaaaaaaaaaaaa

SEQ ID NO: 2467 - DNA, 1122 bp, Homo sapiens
ccagtgttcccagttcccaccagtccaactgcgaggagtgcgacgtgagtctgagtctgatccctccgaaaaccgtacttccggcgctgtctcggaggcctcccgtcccctcccttgtccgtcttctaactcttccccacgccaggtccgtcaagcctaagtccttgagttccgggtccgggcagcagagaaaggaagtcctctccctggaggcctatctccctcagaactgcgcgagaagcgagaccttagaaggcagggcttcccgcgaaggaccggaaaggagcgcctactaaggacgccgtcgaggtccggggcgcctcaactctatagctctaactggctagaagtgcccaacgtggaatgtttcttttttaaaggcggctcttgaagcgacccggaagcggaagtggaagaaagttctagtggcttgagattaagcctgatcaagatgacaacctcccaaaagcaccgagacttcgtggcagagcccatgggggagaagccagtggggagcctggctgggattggtgaagtcctgggcaagaagctggaggaaaggggttttgacaaggcctatgttgtccttggccagtttctggtgctaaagaaagatgaagacctcttccgggaatggctgaaagacacttgtggcgccaacgccaagcagtcccgggactgcttcggatgccttcgagagtggtgcgacgccttcttgtgatgctctctgggaagctctcaatccccagccctcatccagagtttgcagccgagtagggactcctcccctgtcctctacgaaggaaaagattgctattgtcgtactcacctccgacgtactccggggtcttttgggagttttctcccctaaccatttcaacttttttttggattctcgctcttgcatgcctcccccgtcctttttcccttgccagttccctggtgacagttaccagctttcctgaatggattcccggccccatccctcacccccaccctcactttcaatccgtttgataccatttggctccttttttggcagaacagtcactgtccttgtaaagttttttagatcaataaagtcagtggctttcaaaaaaaaaaaaaaaaaaaaaaaaaaaa

SEQ ID NO: 2468 - DNA, 1348 bp, Homo sapiens; identical to SEQ ID NO: 2287

SEQ ID NO: 2469 - DNA, 4930 bp, Homo sapiens; identical to SEQ ID NO: 1755

SEQ ID NO: 2470 - DNA, 2111 bp, Homo sapiens
ggcggcggctggggagaagcgctctcgtcgcctgcccgaggccggagcggcggggcccgcgcctcctccccccagcgccgcggaggggggaggaggaagatggagacccacatctcatgcctgttcccggagctgctggccatgatcttcggctacctggacgtccgggacaaggggcgcgcggcgcaggtgtgcaccgcctggcgggacgccgcctaccacaagtcggtgtggcggggggtggaggccaagctgcacctgcgccgggccaacccgtcgctgttccccagcctgcaggcccggggcatccgccgggtgcagatcctgagcctccgccgcagcctcagctacgtgatccagggcatggccaacatcgagagcctcaacctcagcggctgctacaacctcaccgacaacgggctgggccacgcgtttgtgcaggagatcggctccctgcgcgctctcaacctgagcctctgcaagcagatcactgacagcagcctgggccgcatagcccagtacctcaagggcctggaggtgctggagctgggaggttgcagcaacatcaccaacactggccttctgctcatcgcctggggtctgcagcgcctcaagagccttaacctccgcagctgccgccacctttcggatgtgggcatcgggcacctggccggcatgacgcgcagcgcggcggagggctgcctgggcctggagcagctcacgctacaggactgccagaagctcacagatctttctctaaagcacatctcccgagggctgacgggcctgaggctcctcaacctcagcttctgtgggggaatctcggacgctggcctcctgcacctgtcgcacatgggcagcctgcgcagcctcaacctgcgctcctgtgacaacatcagtgacacgggcatcatgcatctggccatgggcagcctgcgcctctcggggctggatgtttcgttctgtgacaaggtgggagaccagagtctggcttacatagcccaggggctggatggcctcaagtctctctccctctgctcctgccacatcagtgatgatggcatcaaccgcatggtgcggcagatgcacgggctgcgcacgctcaacattggacagtgtgtgcgcatcacggacaagggcctggagctgatcgctgagcacctgagccaactcaccggcatagacctgtacggctgcacccgaatcaccaagcgcggcctggagcgcatcacgcagctgccgtgcctcaaggtactcaacctgggactctggcagatgacggacagtgagaaggaggcacgaggggatttttctccattattcactgtgagaactcggggaagctccagaaggtgagggagaggggacaacgacatggttcccgtggatctttaacttccagacttgcccgctctgcgcctccggcactctggtgatgacagctcaggtttccctgcctgtcactgctcgggcagaggctgctgcccagggcttctgctccggtaccttgtgaagctgcattctcctgccggtttctccagttctggggacagtggtttgctctgagacctcgcttcctttatggatccaaggagacttgctttttcagtctgttcagctttttacttgctaggatggaattgcaatttgcaagcttcttcgacaggaaactacaagttccacactttaattttatacatataaatatatacatgtgtacatatatctatgtacaggggtattatatatatacatataagatgatgatatatataatgatgatatgtattactgagaacgtaaaatatcattacatagtgatagctggacacacaaggaattcacaactccccaaagaaaatacatctggatgacctgcctagcagtttccccatgagatagaggaatgtctacgtatttcattccctgttcctgccctgaaacaatttcaatcactgacaaatcattatcattcattaataatgtttactgagtgcccatatgtgaaagaaatccactctacattccacagatgcatttcctctccccacggggtttccattttaatgggaacaatgtagaatatatctgtcttccctttatagattcca

SEQ ID NO: 2471 - DNA, 6369 bp, Homo sapiens
aaaacggaaggtggttgtcgtccgttcccaagctggtttgaaactaggggtcgggctcggccgtcgtcgttgtttgtcgccgcatccccgcttccgggttaggccgttcctgcccgccccctcctctcctcccttcggacccatagatctcaggctcggctccccgcccgccgcagcccactgttgacccggcccgtactgcggccccgtggccaccatgtccctgcacggcaaacggaaggagatctacaagtatgaagcgccctggacagtctacgcgatgaactggagtgtgcggcccgataagcgctttcgcttggcgctgggcagcttcgtggaggagtacaacaacaaggttcagcttgttggtttagatgaggagagttcagagtttatttgcagaaacacctttgaccacccataccccaccacaaagctcatgtggatccctgacacaaaaggcgtctatccagacctactggcaacaagcggtgactatctccgtgtgtggagggttggtgaaacagagaccaggctggagtgtttgctaaacaataataagaactctgatttctgtgctcccctgacctcctttgactggaatgaggtggatccttatcttttaggtacctcaagcattgatacgacatgcaccatctgggggctggagacagggcaggtgttagggcgagtgaatctcgtgtctggccacgtgaagacccagctgatcgcccatgacaaagaggtctatgatattgcatttagccgggccgggggtggcagggacatgtttgcctctgtgggtgctgatggctcggtgcggatgtttgacctccgccatctagaacacagcaccatcatttacgaagacccacagcatcacccactgcttcgcctctgctggaacaagcaggaccctaactacctggccaccatggccatggatggaatggaggtggtgattctagatgtccgggttccctgcacacctgtcgccaggttaaacaaccatcgagcatgtgtcaatggcattgcttgggccccacattcatcctgccacatctgcactgcagcggatgaccaccaggctctcatctgggacatccagcaaatgccccgagccattgaggaccctatcctggcctacacagctgaaggagagatcaacaatgtgcagtgggcatcaactcagcccgactggatcgccatctgctacaacaactgcctggagatactcagagtgtagtgttggtggcgctgtgcccacgaggcaggggcttttgtatttcctgcctctgccccacccccaaagtaagaagaaacatgtttccagtggccagtatgtctttcattgctttgcacccactgttaccagaagctgctctaggagttcctggccagtcaccccatcgccctctgtggcagactcagtgctgtgtggcgcctcctcagcccagggctgagttttaagattttctctcctttcctcttctcctttggttcctcaattaaaaaatgtgtgtatatttgtttgtcaggcgttgtgttgaggagcagttcacgcactggctgtgtctattcctctgcccaggtgtctctgtttgctgcccaaggcagcagttcatgtctcgtccatgtccatgttcgtgttagcacttacgtgggaacaaataccaatttgtcttttctcctagtatcagtgtgtttaacaaattttaactttgtatatttgttatctatcaggctaatttttttatgaaaagaattttactctcctgcttcatttctttgtcttatagtcctccctctttgcaccttcttctcttccctcagtgcctggagctggtactgggcccctggccccatgagcagtttgccttcttgagtcactgcctgtgtagtacatacctgaccgggagtccaaaccaccttggtgctctgaagtccactgactcatcacacctttcttagcctggctcctctcaagggcattctgggcttgtaaacagacataggaagcctctgtttaccctgaagcaccactgtccagcccattggttcccactggcagcatggtagagctgagagaaacaggctctcagggtacctgacttgaggggaatcgtttcatgaagctgaacttcaagcatatttccagtacattctttcagagtctgtttttccatccaaatataagccccaggccattccacttagtgtcttttcaatgataggcaagaatgatatctgagttgaacttcggtgcttctgttgtttgagtttactgtgcctggtggtatattgggcattctttggattgagtgttctgaggtgagagagtcttcccgaggcatcctgtctgtgcttccaaccctgaacaagaccttacatgagagatggactgatggactgcggcaatcctgggctgtcaagtggatagatagttaaaaagcattatactgtgggtaatgaaaagggaggaaaaaaaaagaaggaaaaggaattatagacccccagggtcagccagttaagagctctacccacacctgtcaacccctctctcccccagtttaggttctgagcagtattggacttgtagcctgcagttgtcttttgacttgcaggccgcaggtgtctttctgttatgtgaatgagttccatggaggggcatatgtgtgattccaccgttagatgagcccttggggcaggcagtttgggatgtgctcttgggggaaagttggctgtttccttgcgctctgctcctacccgaaggtttttaagtccctctgaattgctcatctgagattagtagagtagcaggcctgaaggatgatggttttgtcctctttggttctcacctgcttgagaagtaaaacagtaactttgttcttctgggcccttaagcttttttggttaagtcttccttttcagaagtagatgtcattatatgccaaaagtctagctctttgctttaccatacagggacctgtcccaaagaaaaaggctctttttttagccagcatatttccccttctacccttttactttgttgttctgattttaggactctggctggccatgtgcttgtggttgcctctcctgcatttgccactggatttgcactgcatcgtttggagatacaaagcgagcagttcttggtcagaaccctcctctgcttttcattgtgtttgataatggttactgggtccttctctcaagggtagcaaggccaagctgatggctgcttgtttaggaggccatcagttccttcctgtggagaagggtctgaaatggaagtcagtggtagaaggggctggtctgctgggcagggcttacatccactgagttctaagattcctttcctgatctgcacctacgcctggtctgtatggtggaatttgtcagctggaactcagaaacaacaacttgaaaaaaaaataataattagaacatatttgcataagatagctatttactctggaaaccaacaacttttgagatttcccttgccctgtggacgcccagctcctgtcatccttccttaggtcctgcagtacagtcttcccctgaatgccaccggggacccagggggactccacccccctaagcaagcacacacatactcacagttgatgagttgctggtctttgagtcccagctctcttaccctccctttactccaccagcccgacgacccatgactgaggaggggatttctacagtctcaggatttagaaagtctgtaagccatccatgctccagaaagcaccgatctgttgtagttgcaaaaacaactctgtaatttgttgaggttctcaaactgacagccagcgagactgggtgggaggccctggatctgttctccctgactgcgggaggagcagccactaggactttagcaggaagcccacatggaggctccgccaggctgtggcccagctggtgatggcccttttgctcctggcagcctgaggcacagctgcctgtattgtcctcatctgttctgactgaaggatggaggtgctgaataaattaggcctcaggcctctaccaccagagagctggagaatgggtccacgtcattcaaggacctgaattttttatgctcaggagcattggaatcctcttcttccagggaggaattagcctgcaaggttaggacttgaagagggaaggtatttaataactgggcgaggatgggtgtggtggctcacacctgtaatcccagcattttgggaggctgaggtggccagatcccaaggtcagaagatcgagaccatcctggctaacatggtgaaaccccatctctactaaaaatacaaaaaaaaattagccgggggtggtggcgggtacctgtagtcctagctacttgggaggctgaggcaggagaatggcgtgaacctgggaggtggagcttgcagtgagccaagatcgtgccactgcactccagcctgggcgacagagcaagactccgtctcaaaaaataaaaaaaaaaaaaaaataggtgaaaattccttataaatccaggattggctctgagagaactggctaagattcaggaagaaacaaaaaattcagaatcctacaaggttttgatgacaattagggccaaaattttaggaggagatgtaggatgcaggagaaaattaaagtgttttctttatatcagaggaggaaatagtagaggtcagtgaaggtctggggtagggaaacattcagactgtccattgcatggctgtggagtgagactgcccttagcctgggtcagccttcctgggccataaattgggcatccgtgatgctaggtaactgtgggaacaaaatgacagcttagagcagccatgggtgatgtttggtggtaaaaaacctacaggcgtttggggtcccatgattgttccagaccatgactcttcctggttgtgggtttgttacagagcaggagaagcagaggttatgacagttatgcagactttccccctcctttttctcttttctcttccccttgcttttccactgtttcttcctgctgccacctgggccttgaattcctgggctgtgaagacatgtagcagctgcagggtttaccacacgtgggagggcagcccagtactgtccctctgccttccccactttgagaatatggcagcccctttcattcctggcttggggtaggggagaccattgaagtagaagcctcaaagcagacttttccctttactgtgtgtactccaggacgaagaaggaagatcatgcttgatacttagattggttttcccagggaagagggcggagcagagcaaagtcactgtgaaccctgggccaggccctggctgggccagctcctgagagcgtctcgtgttgcagacccttgcccacttcacccacctgcaccttctccccctctcacagtgtcactgctgctaatggtcaaagtcaaatgtgtggccacatgggatgggccaggtcctctcaggctactttctggatgtcatttttaaaatatggaaacatgcaggtgccttcccaaagaggcttggactggtatatccaacgagaaacaaataagctaaagaaagtttaaactcaagaagaaagatgttgacagtctatgtaacagctggaaagtttataggcacccacctttgggacaacccagtgattatgaacatgtgatatctactatttaaaagaaatgttctcaccttgggttgattgtggtataccatgtgttatgaaaattgttgagctgaagctttgaatcgatttagttgagtctgactcacttgctttggttcctgtgtattttactacccctcttgtcagtgaccttccttccccaccccacccagagtgaatttgtagcatgattgtataaacctctatgtagaaaatggagatttcttgctctgaaatgttaagctctaactgatccatttctgtgtcctttagcctagtatgtctgaacttccattcttgttatatatttaaactttccctctatattataggttttgtggcatccacggtcaggtgtagaggaagctgccccttgcagaactgtactgtaatatttttcttttataaatattttcacaggactgattgtacacagggcttgtaataaaattttaacactgtgctgtgaaacaactatggggaatctccattgaaggctacttcatgggcacctgaaagtggagtgttatagctatgactttctatttcttgtttcctaagtaaattaaacctaattttcaccctttcattctgtttcagcctcctgtataagaagtaccgtattttctgcccatcatactttgtaataaaacttgaacatgtatagattgactgaaaaaaaaaaaaaaaaaa

SEQ ID NO: 2472 - DNA, 6202 bp, Homo sapiens; identical to SEQ ID NO: 418

SEQ ID NO: 2473 - DNA, 3757 bp, Homo sapiens
aatcgctccccgagccgctcctgacccacctaccccagctctcgcgccgcgtgcagaggtgctcaagcctcctcgcggtccgcagtcagtgccgccgcgcccggcctcccgcacgccccgcaggtagcgcccccgcccgcggcccagagtgcgctcgcgccggcaccagctcccggataaacggcgcgccgcgcggagatgacagccgaggagatgaaggcgaccgagagcggggcgcagtcggcgccgctgcccatggagggagtggacatcagccccaaacaggacgaaggcgtgctgaaggtcatcaagagagagggcacaggtacagagatgcccatgattggggaccgagtctttgtccactacactggctggctattagatggcacaaagtttgactccagtctggatcgcaaggacaaattctcctttgacctgggaaaaggggaggtcatcaaggcttgggacattgccatagccaccatgaaggtgggggaggtgtgccacatcacctgcaaaccagaatatgcctacggttcagcaggcagtcctccaaagattccccccaatgccacgcttgtatttgaggtggagttgtttgagtttaagggagaagatctgacggaagaggaagatggcggaatcattcgcagaatacagactcgcggtgaaggctatgctaagcccaatgagggtgctatcgtggaggttgcactggaagggtactacaaggacaagctctttgaccagcgggagctccgctttgagattggcgagggggagaacctggatctgccttatggtctggagagggccattcagcgcatggagaaaggagaacattccatcgtgtacctcaagcccagctatgcttttggcagtgttgggaaggaaaagttccaaatcccaccaaatgctgagctgaaatatgaattacacctcaagagttttgaaaaggccaaggagtcttgggagatgaattcagaagagaagctggaacagagcaccatagtgaaagagcggggcactgtgtacttcaaggaaggtaaatacaagcaagctttactacagtataagaagatcgtgtcttggctggaatatgagtctagtttttccaatgaggaagcacagaaagcacaggcccttcgactggcctctcacctcaacctggccatgtgtcatctgaaactacaggccttctctgctgccattgaaagctgtaacaaggccctagaactggacagcaacaacgagaagggcctcttccgccggggagaggcccacctggccgtgaatgactttgaactggcacgggctgatttccagaaggtcctgcagctctaccccaacaacaaagccgccaagacccagctggctgtgtgccagcagcggatccgaaggcagcttgcccgggagaagaagctctatgccaatatgtttgagaggctggctgaggaggagaacaaggccaaggcagaggcttcctcaggagaccatcccactgacacagagatgaaggaggagcagaagagcaacacggcagggagccagtctcaggtggagacagaagcatagcccctctccaccagccctactcctgcggctgcctgccccccagtctccccactccaccctgttagttttgtaaaaactgaagaattttgagtgaattagacctttatttttctatctggttggatggtggctttaggggaagggggaaaggtgtaggctgggggattgaggtggggaatcattttagctggtgtcagcccctcttcccttcctccattgcacatgaacatatgtccatccatatatattcatcagaatgttaatttattttgctccctctgttaggtccattttctaagggtagaagaggcaagtggtagggatgaggtctgataagaacccagggtggagagggagactcctgggcagccgttttcctcatcctttccctctcccagtccatttccaaatgtggcctccatgtgggtgctagggacatgggaaaaaccactgctatgccatttcttctctctgttcccttcctcacccccgacggtgtggctgatgatgtcttctggtgtcatggtgaccaccccctgttccctgttctggtatttcccctgtcagtttcccctctcggccaggttgtgtcccaaaatcccctcagcctcttctctgcacgttgctgaaggtccaggcttgcctcaagttccatgcttgagcaataaagtggaaacaataaaacctgggtgtcagacaaccctttctgttcagccttggagtggtgggtatgggtgggtacataatgggtagtagcacaatcaaggggtcacccacttagttccagttgagcttaaataagtgagcatctcatgtagatgccatagttgggcaggaagcagccccaccatgcatggcttcctgagcactgcacaggctgccgctgggatttgtgtctatggcttcgcccaaggttcccagcactccctccctccagcaacctggcagttttagtgcctctggttttcttccctgacacttaggaagacgaaagtataaagatctagaagactgggacaccatgcatgttcattttgaagttggaattggtcttctgcctacctctgatctggcagaggtatctgcattttggtttgttaacaaggtaaaactcctggtgtcactgacctcctcctgtcagataacttacatgattaaggttaagagtaaagcagagtgttcacgtccagcttccttctcagccttaacaggaaaaggcttgtgctttttttctaactatgctttgacccttaactcctatggcatgatggggccctgggagaagccaggcagcacaagccagtcatgctgagctgcctccagataatcctggctccaggccagagcccgtgtctgccctcatccctctctcctactgtgagctctccagtcctttcccaacagcgatgtggttgtctgcttagccacatgcctgtatagttccttccagaagaaatgtataatggtggaagatgtatttctgtgtgaaaattttcaccaagtcatacaacacagctgatgctggagccaggattaaaattggggtgtacaagtctcccagtgtgagtatcccttgagcccaagacaccaaggatgcagagaactgtgactgtgccactgcacgccagcctgggcaagagagtgagaccatctcttttttaaaaaagtccctgtgtaactgctttcttactgggcttacctcacatcacagccctgtgtttgtggtttgtgtctgggtcctcttggtatttcaaaagtagtagattcttacgcctgcagccaacaataatcactaactcaagcatttatggagtaagcctagcactgtactgacagcatcacatgagtgaaactgaatccttgcaaccatcctacaaagaaggtataactttaataaccctatttacagataagaaaaccaagactcagaagttaaatggaaaggtgaggtctctgaactaatccagactctcccatgaggttcctttggcaagtcctgggcttctgtcctcatctgcaaaatcgaaagcattcctgaggtttcttccagctctgcatcctgtaggattccaagaatgtaaaactgcatgtaaccgtggaacatctagagataagtcttagtttatgtaacattaaaactgtctagtgaggatgttttgttaaaaaaaaaaaaaaaaaa

SEQ ID NO: 2474 - DNA, 5426 bp, Homo sapiens
aaatcgcgacctttgaaagcaaaacactgcagcatcttggcagctctgaattgggaagggatgaaggaggctgtgcctccgggttgcacgaagagtccgagtcatttctcagaaggttttgataggtgggccttagaggagacgccgccgagcaccgcaagaactggaaaacacacccctctctgtctgcctgggagagccacggaaattggcacttctctgagtgaagctgaggagaaggctgtaaatctgccaaaacagccttgaagtattcttttgtcatgaggaagtgacggctgctggagggaggtgaacaccacaaggagagatggcatctggcctgggccccgcctagcagcagctccacctcctaggccaggccctgtgggatgcgccactagaccaccatggacggatcccacagcgcagccctgaagctgcagcagctgcctcccacaagtagctccagcgccgtaagcgaggcctccttctcctacaaggaaaacctgattggcgccctcttggcgatcttcgggcacctcgtggtcagcattgcacttaacctccagaagtactgccacatccgcctggcaggctccaaggatccccgggcctatttcaagaccaagacatggtggctgggcctgttcctgatgcttctgggcgagctgggtgtgttcgcctcctacgccttcgcgccgctgtcactcatcgtgcccctcagcgcagtttctgtgatagctagtgccatcataggaatcatattcatcaaggaaaagtggaaaccgaaagactttctgaggcgctacgtcttgtcctttgttggctgcggtttggctgtcgtgggtacctacctgctggtgacattcgcacccaacagtcacgagaagatgacaggcgagaatgtcaccaggcacctcgtgagctggcctttccttttgtacatgctggtggagatcattctgttctgcttgctgctctacttctacaaggagaagaacgccaacaacattgtcgtgattcttctcttggtggcgttacttggctccatgacagtggtgacagtcaaggccgtggctgggatgcttgtcttgtccattcaagggaacctgcagcttgactaccccatcttctacgtgatgttcgtgtgcatggtggcaaccgccgtctatcaggctgcgtttttgagtcaagcctcacagatgtacgactcctctttgattgccagtgtgggctacattctgtccacaaccattgctatcacagcaggtgcaatattttacctggacttcatcggggaggacgtgctgcacatctgcatgtttgcactggggtgcctcattgcattcttgggcgtcttcttaatcacgcgtaacaggaagaagcccattccatttgagccctatatttccatggatgccatgccaggtatgcagaacatgcacgataaagggatgactgtccagcctgaacttaaagcttctttttcctatggggctctggaaaacaatgacaacatttctgagatctacgctcctgccaccctgccagtcatgcaagaagagcacggctccagaagtgcctctggggtcccctaccgagtcctagagcacaccaagaaggaatgagactcgcctccctctatttataactgtcccctccaggctgacagtggttcaaccctgaatcctaaaacttgcctttcaagtctcattttgtttctaactgagaactctatggatgatgatctcaaaaagcctttgtctctgggaaaggatgcgttatcttggtcttggaaatttcaaatgatgagggttgggggatggaagcattattccaggtggacgggatagaatccagcctctgcctggattagcccagggggatttggaaagcctttctaccatccttgaggatggtaactgagcttcctctgacagtgaccaaaggatgctgtatccttcagagctaaggcaagacagagagtctgctgttaattctcaaatccagcgaaaggctggacatctctaaatctcgtcttcctccacctcatgtgcatgcctgatctcaccctgacactcctgatgccgcatctgtgatagcactcgtgttgccttcacatggcaggctgggccaaccctgggtggaaggttctgacatttgtgttttcagaaatgtacatctgccttccagtcatctgtgcccttctagggaagatgtgcttgatatgttcaaattggatctactctgaaaacgaaacttggttttggtcctgtgaggactacttgtttgtccacctcctccaccaaaggaattaggaagttaagagaaggggaagaatatggaggataggagagggtgatgatgctttagcccattaaggaagaaaagttccccttactcttacaaaaggtgattgcaccacttaaaaaaggataggtagaaaatctggccattttatgtgttatttttttcctgcataccagtgccccctggaaagatggggatgctcatttcagagacagcctcttcacctgtcctccgtctctccattacagagccacaagccaagcttgagttactggttaatttccttgaagtcaatagagactctctgggtcctcatccccatgcatatatgtctgggagaagcaagcattctccaaaacagggctgttgctttcttcctggccgcatatgtgactgtcttcccctagactgatggtatacttttgagaggggcggataaaggtttgcaaactttaatgggcataaggatcccctagaagcatatgtaaaatgcagattcctgcaccccaactgcagacactgttaagtgggactggagtggggcccacgggtctgcattcttaactggtaccaccagtgattctgatgcgatgcttcaatcccgagatttcacatctggaaagcctaagaatttacaaagatgttctgctaaaacccccagggccccatgcagtcttgctagaaaatttcctccctagggttcctttggaaggttaaatactccccataggatctgtggcatttctccatccaatgaatactacttagagctacactcaccacttccctagacagcctttaataggcatgataacagtgttaatagaccagtgtgatagatcacttatctttatggattgtgcttaatactgatttagtatcttgactccaaaaactgacatctgttgtctgtgataaccacttctgtattgcgtcttaaccacttctgtattgtgtggtcttaactgcctaaggcggcaatgggcagtgggcccctttcccttaggatgggtatcaattcaacaatatttataaggcatttactgtgtgctaagcatttggaagacccaggctacaaaataagacatagttcctgccctccaggccagcagagggaggcacaaatacccaggaatctctgatgggtgtgaagtgcggtcgtgggccacagaaaatgaccgtcatggagaccctgctaaaggtcggaccctgagcccaaaggggtattcagaagtggagatgattttggccccactcatagatgggtggcaaatctaagatttgtataaagcatataaaatagggtgatcacccccgaggcagaggggccagcatttgcaaaggcacagagctaagaggagctgggcaaagaaaggaaagccagggaaggtggtgggagatgagtctcaaagctaagtagtggaagctgggcacagtggctcatgcctgcaatcccagcactttgggaggccaaggctggaggatcacttgagcccaggagttttatatcagcctgggcaacatagcaagacctcatctctgctaaaaattaaaaataaataaattagctgggtgtggtggtgcatgcctgtgatcctagctactcaggaggctgaggtgggaggatcgctagagcccagagagccaaggctacagtgagccatgatcatgctactgcactccagcctgggtgacaatgagaccatggctcaaaaaaaaaaaaaaaaaaaagataagcagtggaggccgaatcatggagggtcttgaatacctggctaaggagtttaaagtgtatccaagaggacgtgggagccactgatggttcatgaggaagagaagggcaggaccagcactgattgaaaaggagggcttgttcagtgtggaggaagaatcagaagggggaataagttaccttctccgagcctgcaagaacaaaaaacaaaaagcagaaattaaaatcaggtttcactgctatttatatatttctcctttcccaaatgatttttctaaagctgggagtggaggcaggagggagaaacagaaggtgagcagggaggctatttagatgtgtcaaacccgggtgatcattaataatttgggcatatatatgctcccaaacttactctgcccccttccttcccttttttttttttttttttggtatgggccttttaggcttgggccagccagctttcttgagatgagtgaataaaagcgtattgtaatttcatgtctgcttcagatcatggggacagtgccacccaggaactgctgctgaggcctgggaagctcccttgccttcgggtttggagcagtggcatcatcccaccaacctgagccatgaaagggctgagcagaaagttaaatggtagtttcctgactggaagccacacgtaggtcacttgagtagtcaggaagcacagtgggtgtggagccatcatctgtcttgggctggttcctcccaatctttgtccagtggtataaatggactgtctgctgatggccatacgcagcactggctgttaagatggggaaggggtacatcaggattccactcatagccctggttcgttattgttactcatggctctgacgtccccaagccctcttgaatgttgcaagcaatgttaaatatcacacctcggtctccttttgagcagcccaggtacctaaagcaaggtcaccaaacttgggtttaaacttcagttgccatcacagcagggttcaggttatgcagtttttgcagtgtggagttgaacgctgggtaaagaagggagagctgactctccattgcttttctagtggaaaccagccagtttgacggcacggtgcggatacaggactccatcaggctagtgttggggaaccagcccggcagccttccatgtgaattccaaagctgtttcaacactggctgataggcagacaaaaggttacttgtgtgtttctctgagaagcggtgtaaatgaagtcaccttagaatatattctgtgcggatgcttatattttgttaacttcacgacttatggcatgtcttatttaaaaaaaaaaaagtactaggtgcaaataacattatgaagtggtatttaattaaaaatccatgcagtgacagctga

SEQ ID NO: 2475 - DNA, 2110 bp, Homo sapiens
acttctaggcttggttgaaccgtgcagataccttctcgaaacaaaagattttcctacctgcttatacttggtaaccgagggaatttctaagacttcttgctcatttctgagtattgtctttatatcctgacactatgaatgctacttggatgcctcttaagggtctcttctgcagggtccccatgaattgtggctgaagttgtgcacaaacaagtatctccagtgacaggagtgccttctgaggcagccattgcatcttcatctgctgacactctgctaggctgacttctgtagttttcaccactgatcttcagtccacctcacagagctctataaaacgcttaaatcctctttacatcatagactttcagctacttgaagatagccatcagccgctacgtgactcttttctccaggatctccctaatactatgaacgcggcagagataacggacaagctcggcctccattccctccgctacagaaactggcacattcaggctacttgtgccactactggacatgggctttacgaaggcctgaactggctcgccaaccagttccagaaccagaactgatcagaaggatctattctttgtgccttgtggccacatcagctagcctctgctgtgtgcacgtgtacgtgtgtgctgggagtggaggcagctttctcacagtgccttatccatgccataagaaaagcagtgttacattttaagaaacccagtgttaagttttaaacaccaccttccatttcagtagctttgatgatcatttttgcaattgatggagaagtccagagggcttgctggtgctcgaaggccagagcgggcttcatggaggcgagttggagcggggactgagttcagctgttgcaatcctggtctggcgtctggagtcctgttagtctttggcatcctttcgtaaaaaggaaggaattgtcattcttttttttttaaaaccatatttttactgtaccttttcatgtttatttattttttattaaaaaaattttttttgaaacagcctcccactctgtcgcccaagctggagtgcagtggtgcgatctcagctcactgcaacctccgtctctcgggctcaagcaatcctcccacctcagccccctgagtagctgagactatgggtgtgcaccaccacacctggctaatttttgtattttttgtggagacagggtcttgccatgttgcccaggctggtctgtaactcctgagctcaagggatccacccacctcagccttccaaaatgctgggattacaggcatgagccactgcgctaccgagaaatcgtcattctttaccaccactgctgcagctagcagctcactcttcagtgctttaagcaaatgatcctcaggaaagaaaaggtatttgcttattgcaggtgcaaagaggctcagattggaacttttccctgaaactatattgtagcccagagttcctgatgtaagacgctttatttaaagacatccgtgagctttttcactggcatatcaatacttcataacactaggaaggtatccagccttttccttatgctagttccttcccttatttgccagatggggaccctgtggggaggtgacccagtgtgaggccgaagctctttcccagagccccacaggccagtggagggtcgtgtttgtgctctgggcatcaccgtcttgggtctcggtcccctgcgactgcagctgctacatccctccctgctctgagataaatgttcttcccatgaagcagacggttcacttttgggatggcgctgtctccaggtttggctgtctcagtccagatgatgtttggttagtttccattcccagaaccacaagcctttgagttctgaaagtttgtgacagaatcaagaggctaatttgggagatgtgagattcccagcccacctggtattgccctcgagttagtggtaaattttgctatggaaaatatctcttgtcaagaccaagctccggcgcattgcctccctcttttggatggccatggcatctcatgaaccacttggaaatgtgttttatgttgttctccaaatattaataaaaatatcccggagaggaggttcactaaaaaaaaaaaaaaa

SEQ ID NO: 2476 - DNA, 6915 bp, Homo sapiens; identical to SEQ ID NO: 1079

SEQ ID NO: 2477 - DNA, 1035 bp, Homo sapiens
gtcacaaggttgattgattagttggggtgaggcaggaacaaatcacaaaggtggaatgtcatcttttgtggttcttcagttgctccaggccatctgggtgtatatgtgcaggtcacaggcttagcttgggctcagaggcctgacaatttataaaatacttcattcaacaatagcagaccacacattcttctcaagttcacatggaacatttgccatgacagatcacattctgggccataaaatacaccttagcaccttttcaaagaatagaaatcataccaagtactctttcagaccacagtagaattaaactagaaataaataaataacaaagttaactggaaaatcccaaaatatttggagattaaacaaaacactactaaataacacatgaaccaaagaagtctcaagaggcataaaaatattttaagctaaacaaaaaatataacttatcaaatcttgtgggatgcaggaaaagcagtgcttagagggaaatttatagtattgactacatagattagaaaagaagaaagatccaaaatctacaagcttcaacattaggaaacgtaacaaaaaattaataatcaacattagaacagaaattaatgaaattgaaaacaggaaatcagagaaaattttaaacatcaaaagctggttctttgaaaaaaaaaatcaataaaatcaataaaactttagccaggctaaacaagaggaaaagaaaagagacacaaattccaaacatcagaaataaaggaggggcatcactactggtaacatggctaataaaaagattaaaaggaatatcatgaacagccctacacccataaacttggtaacttagataacattggccagtttcttgaaaaacgctatctaccaaaactcaaacaaggagaaatataatctgggtgggcctacatcaattaaaagaaatggaatccataattaatactcttccaaaacggaaagcacaagactcagatgttttcactggtgaattctaccaaacatttaaggaaaaaaaaaaaaaaaaaa

SEQ ID NO: 2478 - DNA, 7603 bp, Homo sapiens; identical to SEQ ID NO: 2117

SEQ ID NO: 2479 - DNA, 1712 bp, Homo sapiens
cgaaatcggctggtttatattggcgcggcccagacggcagaggtctctgcggcgcggtcctcggagacacgcggcggtgtcctgtgttggccatggccgactacctgattagtgggggcacgtcctacgtgccagacgacggactcacagcacagcagctcttcaactgcggagacggcctcacctacaatgactttctcattctccctgggtacatcgacttcactgcagaccaggtggacctgacttctgctctgaccaagaaaatcactcttaagaccccactggtttcctctcccatggacacagtcacagaggctgggatggccatagcaatggcgcttacaggcggtattggcttcatccaccacaactgtacacctgaattccaggccaatgaagttcggaaagtgaagaaatatgaacagggattcatcacagaccctgtggtcctcagccccaaggatcgcgtgcgggatgtttttgaggccaaggcccggcatggtttctgcggtatcccaatcacagacacaggccggatggggagccgcttggtgggcatcatctcctccagggacattgattttctcaaagaggaggaacatgactgtttcttggaagagataatgacaaagagggaagacttggtggtagcccctgcaggcatcacactgaaggaggcaaatgaaattctgcagcgcagcaagaagggaaagttgcccattgtaaatgaagatgatgagcttgtggccatcattgcccggacagacctgaagaagaatcgggactacccactagcctccaaagatgccaagaaacagctgctgtgtggggcagccattggcactcatgaggatgacaagtataggctggacttgctcgcccaggctggtgtggatgtagtggttttggactcttcccagggaaattccatcttccagatcaatatgatcaagtacatcaaagacaaataccctaatctccaagtcattggaggcaatgtggtcactgctgcccaggccaagaacctcattgatgcaggtgtggatgccctgcgggtgggcatgggaagtggctccatctgcattacgcaggaagtgctggcctgtgggcggccccaagcaacagcagtgtacaaggtgtcagagtatgcacggcgctttggtgttccggtcattgctgatggaggaatccaaaatgtgggtcatattgcgaaagccttggcccttggggcctccacagtcatgatgggctctctcctggctgccaccactgaggcccctggtgaatacttcttttccgatgggatccggctaaagaaatatcgcggtatgggttctctcgatgccatggacaagcacctcagcagccagaacagatatttcagtgaagctgacaaaatcaaagtggcccagggagtgtctggtgctgtgcaggacaaagggtcaatccacaaatttgtcccttacctgattgctggcatccaacactcatgccaggacattggtgccaagagcttgacccaagtccgagccatgatgtactctggggagcttaagtttgagaagagaacgtcctcagcccaggtggaaggtggcgtccatagcctccattcgtatgagaagcggcttttctgaaaagggatccagcacacctcctcggtttttttttcaataaaagtttagaaagaaaaaaaaaaaaaaaaaaaaaaa

SEQ ID NO: 2480 - DNA, 2120 bp, Homo sapiens
atggactggacctggagaatcctcttcttggtggcagcagccacagatgcctactcccagatgcagctggtgcagtctggggctgaggtgaagaagactgggtcctcagtgaaggtttcctgcaaggcttccggatacaccttcacctaccgctacctgcactgggtgcgacaggcccccggacaagcgcttgagtggatgggatggatcacacctttcaatggtaacaccaactacgcacagaaattccaggacagagtcaccattaccagggacaggtctatgaacacagcctacatggagctgagcagcctgagatctgaggacacagccatgtattactgtgcaagagggtatagcagcagctgggatgatgcttttgatatctggggccaggggacaatggtcaccgtctcttcagggagtgcatccgccccaacccttttccccctcgtctcctgtgagaattccccgtcggatacgagcagcgtggccgttggctgcctcgcacaggacttccttcccgactccatcactttctcctggaaatacaagaacaactctgacatcagcagcacccggggcttcccatcagtcctgagagggggcaagtacgcagccacctcacaggtgctgctgccttccaaggacgtcatgcagggcacagacgaacacgtggtgtgcaaagtccagcaccccaacggcaacaaagaaaagaacgtgcctcttccagtgattgctgagctgcctcccaaagtgagcgtcttcgtcccaccccgcgacggcttcttcggcaacccccgcaagtccaagctcatctgccaggccacgggtttcagtccccggcagattcaggtgtcctggctgcgcgaggggaagcaggtggggtctggcgtcaccacggaccaggtgcaggctgaggccaaagagtctgggcccacgacctacaaggtgaccagcacactgaccatcaaagagagcgactggctcagccagagcatgttcacctgccgcgtggatcacaggggcctgaccttccagcagaatgcgtcctccatgtgtgtccccgatcaagacacagccatccgggtcttcgccatccccccatcctttgccagcatcttcctcaccaagtccaccaagttgacctgcctggtcacagacctgaccacctatgacagcgtgaccatctcctggacccgccagaatggcgaagctgtgaaaacccacaccaacatctccgagagccaccccaatgccactttcagcgccgtgggtgaggccagcatctgcgaggatgactggaattccggggagaggttcacgtgcaccgtgacccacacagacctgccctcgccactgaagcagaccatctcccggcccaagggggtggccctgcacaggcccgatgtctacttgctgccaccagcccgggagcagctgaacctgcgggagtcggccaccatcacgtgcctggtgacgggcttctctcccgcggacgtcttcgtgcagtggatgcagagggggcagcccttgtccccggagaagtatgtgaccagcgccccaatgcctgagccccaggccccaggccggtacttcgcccacagcatcctgaccgtgtccgaagaggaatggaacacgggggagacctacacctgcgtggtggcccatgaggccctgcccaacagggtcaccgagaggaccgtggacaagtccaccgagggggaggtgagcgccgacgaggagggctttgagaacctgtgggccaccgcctccaccttcatcgtcctcttcctcctgagcctcttctacagtaccaccgtcaccttgttcaaggtgaaatgatcccaacagaagaacatcggagaccagagagaggaactcaaaggggcgctgcctccgggtctggggtcctggcctgcgtggcctgttggcacgtgtttctcttccccgcccggcctccagttgtgtgctctcacacaggcttccttctcgaccggcaggggctggctggcttgcaggccacgaggtgggctctaccccacactgctttgctgtgtatacgcttgttgccctgaaataaatatgcacattttatccatgaaaaaaaaaaaaaaaaa

SEQ ID NO: 2481 - DNA, 3817 bp, Homo sapiens
cggccccggccccggctccggcgctgctcccaccgccgcggcaacggccccggcccacggaggcggctggacggacccccgacggttggacgtacggactctgcttcgagagtaggccatggacaccttcagcaccaagagcctggctctgcaggcgcagaagaagctcctgagtaagatggcgtccaaggcagtggtggccgtgctggtggatgacaccagcagtgaggtgctggatgagctgtaccgcgccaccagggagttcacgcgcagccgcaaggaggcccagaagatgctcaagaacctggtcaaggtggccctgaagctgggactgctgctgcgtggggaccagctgggcggtgaggagctggcgctgctgcggcgcttccgccaccgggcgcgctgcctggccatgacggccgtcagcttccaccaggtggacttcaccttcgaccggcgcgtgctggccgccgggctgctcgagtgccgcgacctgctgcaccaggccgtgggtccccacctgaccgccaagtcccacggccgcatcaaccacgtgttcggccacctagccgactgcgacttcctggctgcgctctacggccccgccgagccctaccgctcccacctgcgcaggatctgcgagggcctgggccggatgctggacgagggcagcctctgaaccccggcgccgcccaaccgcgcccctcgcgccttttggggctctcctgctgggcgcgggtggggtttgtgggtttttttccacctcttttctcccaatcggactccggccaaactcccctagacagatgggtgacctgtctcctttgagaggatgctgaggcatctgtagcagctgtttcaaacaccaatgtcacctctcctcctggcccccgcccaatggggagaggaatttggggccctactctggggaccacctttcacccgtttgtactttctgggccacgccgacccctgggtcgcttgatgtaaaagccaaaagctgctgcctcccacttggatcatgtcgcctgggattttcatccctcgcacaaggactacgggttcacacggtgaactgggggaagggaagtgttagggggcaagtcgcggcacccccccttccataaactcacgtcctaacccccaggacctcagaagatgatctgatttggaaataggatcattacagatggaattagttcagatgatctcatcttggagtagggtgggccccaattcaaggactggggtccttaaaaaaagggggcctggggcagggcgcggtggctcacgcctgtaatcccagcactttgagaggctgaggcgggcggatcacgaggtcaggagatcgagaccatcctggctaacacggtgaaaccccatctctactgaaaatacaaaaaattagctgggcatggtggcacatgcctgtagtcccagctactcgggaggctgaggcaggataatcacttgaaccaggaggaggaggttgcagtgagccgagattgtgccactgcactccagcctgggtgacagagcaagactctgtctcaaaaaaagaagcgggggagtgggggattgaggccacgtgcagtggctcactactctaattccagcactttgggaggccgaggcaggaagattgcttgaactcagaagttcaagaccagtctgggcaacatggtgagaccctcgtctctacaaaaaaaaaattatcgtggtgggccgggcgtggtggctcacacctgtaatcccagcactttgggaggctgaggcgggcagatcacaaggtcaagagatcgagaccatcctggccaacatggtgaaaccccgtctctactaaaaatacaaaaattagccgggcatggtgttgcgtgcctgtagtcccagctacttgggaggctgaggcaggagaatcgcttgaacctgggaggcgcaggttgcagggaggcggaggttgcagtgagccgagattgcaccactgcacttcagcctggtgacagagcgagactcgtctcaaaaaaaaaaaaaaaaaaaaaaaaaaaagtgactgtggtggtgcacacgtataatcccagctacttgagagatgacgagggaagatcacttgagcccaggagttaagaggctgcagtgaccgatgatcatgccactgcactccagcttgggtgagagtgggactctgtcttagaaagaaaaaaaaaagtatttggacacagacatgcatgcaaggaaggccaatgatgccggccaccaccaggagctgggagaggcccagggcagatccccttcagccttggagggacctagccctggccacaccttcatctcagacttgcggcccagagaactgaatgagaataaatgtgcgtgaagcccctcagtccacaggatgtggtactggaagcccccactcaagaaggctccagtgaatgctggcacgttcagccaggatgcctccgtgaagctggagacctctgccctgggtcgggaggggaaactgctccaatccagggactgccacatgggaggggacggagcgtgcccacctcccaggggtgaggggggacccacctgagatgtgtgcacattttatttatttattgttttgagacaaagtctcgctgtgtcacccaggctggagtgcagtggtgaaatctcggctcattgcagccccttccttccaggctcaagtgatcctcccacctcagccccgggtagctgggactacaggtgtgcacgagcacacccggctaatctttgtattttttgtagacagaaggtctcaccatgttgcccaggatggtctcgaactcctgggctcaagcgacctacctacctcggcctcacaaagtgtgcacattgtaatatcgtgatttcatatttggagaatcagcaaccaaccagccaaccatgttgcttttataagacagagctgagaaagcaaagcttggctgtcgtcttggctctggtaccacccacgagatgcgggcgattctcagctcagggcgtggaggcgtggtgtgggggagtctatttgccatttttgtttgtcagcagggggcaggggttctcaaagattgcaaaatgctgctgcaggtcaggaaggttattttgggtgcctgtgggggaggtgaaacaaggtcccatgactgttttgcagaaccttgtctgtggagggtagaggttgcggcaggggcctgtgggccttacttggtgagaaggtaggtctagctggctccattcagtatttgagacatttggaatttgtctgcatttaaaaccaagagatcacacacacctgtctggatttggagtttctcttgaaaactcgccagtccggccgtctgagcctgcactgacgcctggtgaagctgtgcaggggccgcccctctccctttcaccacagtcctctccactccctttcgcctctccctggcctgctgcactcactgataggaaattctgaccccagactcggagcagccttcccgtggttcggtttttgcttccgcgaaaaagccaaaggccttggccagagagccagctgttcctacctctaccccacgcttccaaggcaaccttctccacttatcttaggccgagagacagctcttcaagaacgtacatggatcctgattttctcacgaagtcccgatggaaccctgtgctgttgagacatcagtgtgtaaaactctctgtgtccctgttgggctgtccagacagtctggactcttgtaaatttgagatttaattaaaggaaacaaaccaaataggactgcggaacaatttaaataaaagcacacaccagcctggg

SEQ ID NO: 2482 - DNA, 2534 bp, Homo sapiens
attgcaacctccgcctcctgggttcaagcaattctcctgcctcagcctcctgagtagctgggattacaggcgcccgccaccactcccagctaatttttgtatttttagtagggacgaggtttcaccatgttggtcaggctggtctcaaactcctgacctcgtgatctgccctccttggccttccaaagtgctgggattacaggcgtgatggagatgatactccctaaatcacaagggtgtggtgtgaagatgaaatggctgcacgtgacagaggagttggagaacaggaagcaagtggattacttggatgaactgtgatgggcccaagaagaactaagccaatcactccagggggcgttttcccaggatccaggcagagagctgattccagcatccacgttgtatccccctcccgctgtggccggggtctccaagagccgggcacccactgcagagcttccaagcccaggcccatttgaacacaggaggacttttgaggttcatttaaccccaaaatcagtgattctacatctcaagctcatattttgaagtgtttacggagagggagcaggtctagagaagaaccagaggagctcagctgagatatggtgtatggattggattttggtagaagatgggaagaaccaaacacctgagaaaccactttgaagatcggggtcagagtaaggcctaacacatagttggctcccagtaattattggttgattgaacagctcaaagagcaactcgaccaagaacactggactgggagtccagttacttggatcttgcattcctgatttatttttattttatatgtattttttctatttttttgagacgaagtctcactcactctgtcgcccaggctggactacaatggcacgatctcggctcactgcaaactctgcctcccaggttcaagcgattctcctgcctcagcctctcgagtagctaggattacaggcatgcaccaccacgctggctaatttttgtatttttagtagagacggggttttgccatgttggccatgctggtgtccacctcctgacctcagttgatcttcctgcctcagccttccaaaatgttgggattacaggcgtgagccaccgtgcctggccgtgatttattttttttgtgtatgtttgtttttgtcaacttgctgtgtgaccttaagcaagttacttaacttctctgggcttcactttccatggatgaacattgtaaagaggctggagagagatgaggactaggtacaggctttagaggagagccaccgccccggacttctccctctgtcaccccgctttccatgaccctccttgcctgactttgtgactccttgcctcgctatcaaaacaagtgctgcaatctcagtgctttccaagagccctgcattgttagaaacttcccagcacgcagcaaaggctgctgcaatactcgctctgcctgcctttgccctgcgcttcctacttaccctccttttgtttctcccaaacatctgtccctgactatgctcatctcatgtttgtcctcagctgctgaaagggccacgtttgttttcattacaaataagaccaccgagtgggctcctggcgtgggggcgggaccagccgcgcgcagtcttcagaggcagccccccaggctgtctctggagggtgtgtctctgcttccctttccccgtgtttattttcagacgaagccaagtggcccggggggaccctccggactcccagccttcagagaggagggcagctcgggctttcgccgcagtgcttcctgcccgtcacgtgtgtgctcctagccggggtcgggggagctggtatcttggcccttctgggaggacgcgcacagcccgaggaggcagagccccagacgggaatgggcttttcagaggtggggtgcgggcgaggggacgatgcattatttttaatatttgatttatttttccaactggacttcttcccggggctctttctgggcccagctgcctttgtgatcccgcgccccggtcctcggcctctcacctccagcgccggggcgccccctgctgtcggaagcggctgtgaccgggcagaggtgctatctgggactctgggttctcagcccggggacagcgaaccgaggggcagatgatccatcagaaaagagccggcactgcccagccccgcgcccctgcccctgcctttttccgggagcgcgccgcgccgcacccgctacggccgcttgaccccatctttgagcccggccccaagctctgggaccgtcgtgcccctcatcaaggaagagccaaggaccccaaggagaagaaatgcctggggcccacgaacatcccagtgtggccctggacgggacatcatgctgggcaacacagctaaaatgcgggtgaagaccagatttcttgcacatggcggtgacgggatgctccctagagagcttcaagtggattctttgctttttattttctctcttaataaaaatgtatgatgtttacattgtcagagaacaaacagaaaaaaaaaaaaaaaaaaaa

SEQ ID NO: 2483 - DNA, 2138 bp, Homo sapiens
ggcagatctcacgagagaggatttggcgccctcctctgtggattctggccaggccgggttcggcggttgctgtgagagcgggcttcccaacaccatgccgtccgccttctctgtcagctctttccccgtcagcatcccagccgtgctcacgcagacggactggactgagccctggctcatggggctggccaccttccacgcgctctgcgtgctcctcacctgcttgtcctcccgaagctacagactacagatcgggcactttctgtgtctagtcatcttagtctactgtgctgaatacatcaatgaggcggctgcgatgaactggagattattttcgaaataccagtatttcgactccagggggatgttcatttctatagtattttcagccccactgctggtgaatgccatgatcattgtggttatgtgggtatggaagactttgaatgtgatgactgacctgaagaatgcacaagagagaagaaaggaaaagaaaaggagaaggaaagaagactgaggggcagcagctgcttggagtttgcgtccttcccgtccacccagtgcagctcccagtgctgcagtgtgcgtggcgtgggcatccttccagctgactcatggtttgaaaaaccgttgttttatttaaatatccacagtggtagggcacacactgaagttggcttttcagccagcactgaatgtatccatcaggacatgcgtcttcaggtgcctgatctttgtagtcaggctgtgggaacggtctctgcagagcttcataactgggaatttgatttgaagaagtccatgtcatatgtgtaactagtactaattataaatataaaatacacaatataaaatatgaaactcaataataaacagtgccacctgtacatgggcaccatgccctcctcctcgtgctgtgttttctagtgcatgccacagttcgcagtagagggtgttttcaccttccaagacatggggcaaagtttggagacacctggttgtcactggagggggtggtgctcctggcttctcctgtggagcccggggtgatgcataaaatcctgtgtgcctgggtcagccgcatcacagacaatgacttgacatgaaatgtcagctgtgctggggcagagagaccttggaaggaagctcttggaaaatacgttgtatctcagtttgatgaaccaattcacaagaggctaggccctctctagcaaagttatgggctgctttactgaaaacagaatggaagccctgaagtcaacactccatggagaagcgtgtctttcctaatgtcctggtgttctgttgatttaggtgcttgggaacacaatgctcccagttctgttaggacaggcatactgttactttgcaatatccactttataaaatagctcctgcccagtggctcttggttcctgtcaaatgtggacctgtagtttaagaatgacaggtggttagagacccagatatttaaaaataggtgttcaataagggaatactgattgtgcattgtatctggatagcatgcctaattgtgcatttctgaaagttaccaattcaaaatgtaattggaacagttatctttgattagacaagcctgggaagagaatgttgaggtgcagagctcaccagccaagttcatgcccctctcgggcctttgtggctgagaagtgggacagaaagatgattaaggtaatgtgtcctccctgtagcattgtccagggccgttgtgtagatatttgacttcactgacagaaaagaaaccagggagtttgtagagactgtgcatttttagtataacattttcaccatctgatatggtttggctttgtgtccccacccaaattgcatctcaaattgtaatccccatgtgtcaagggagggacctgatgggaggtgatgggatcatgggggtggtttcccctatgttgttatcataatagagagggagttctcacaagatctgctggttttaaagacagcagtttcccctgctgtcactgtctctctcctgctgccttgtgaagaaggtgcttgtttctccctctgccatgattgtaagtttcccgaggcctccccggccatgtggaactgagtcaattaaacttcttgtttataaagtaaaaaaaaaaaaaaaa

SEQ ID NO: 2484 - DNA, 8618 bp, Homo sapiens
atgtccttgagcagtggagcctccggagggaaaggagtggatgcaaacccggttgagacatacgacagtggggatgaatgggacattggagtagggaatctcatcattgacctggacgccgatctggaaaaggaccagcagaaactggaaatgtcaggctcaaaggaggtggggataccggctcccaatgctgtggccacactaccagacaacatcaagtttgtgaccccagtgccaggtcctcaagggaaggaaggcaaatcaaaatccaaaaggagtaagagtggcaaagacactagcaaacccactccagggacttccctgttcactccaagtgagggggcagctagcaagaaagaggtgcaggggcgctcaggagatggtgccaatgctggaggcctggttgctgctattgctcccaagggctcagagaaggcggctaaggcatcccgcagtgtagccggttccaaaaaggagaaggagaacagctcatctaagagcaagaaggagagaagcgaaggagtggggacttgttcagaaaaggatcctggggtcctccagccagttcccttgggaggacggggtggtcagtatgatggaagtgcaggggtggatacaggagctgtggagccacttgggagtatagctattgagcctggggcagcgctcaatcctttgggaactaaaccggagccagaggaaggggagaatgagtgtcgcctgctaaagaaagtcaagtctgaaaagatggagtcccctgtttccacaccagcagtgctgccaatacaccttttggtgccagtggtcaacaatgacatctcatctccttgtgagcagatcatggttcgtacccgatcagttggggtcaacacatgtgatgtggctctggccacagagcctgagtgcttgggcccctgtgaacctggaactagcgtcaaccttgaaggcatcgtgtggcaggaaacagaagatgggatgttggtggtaaatgtaacgtggaggaacaagacatatgtaggtacactccttgactgcacacgacatgattgggcacccccaaggttctgtgactccccgaccagtgacctggaaatgcgcaatggccggggtagaggcaaacgcatgcgtcccaacagtaatacacctgtcaatgagacagccacagcctctgacagcaaagggaccagtaacagcagcaaaacccgggcaggagccaatagcaaaggccgtcggggcagccagaattcttcagagcaccgcccacctgccagcagcacttctgaggatgtcaaggccagcccttcctcagctaataagcggaaaaacaaacccctttcagacatggagctgaattctagctcagaggactccaaagggagcaagcgtgtccgtactaattccatgggctcagccactggcccccttcctgggacaaaggtagaacccactgttctggacagaaactgcccctcccccgtcctaattgactgtccccacccaaactgcaacaagaagtacaagcacatcaatggacttaagtaccaccaagctcatgcccatacagatgatgacagcaagccggaagcggatggggacagtgagtacggagaggaacctattctccatgcagatcttgggagctgcaacggtgcatctgtctcacaaaaaggttccttgtcccctgcccgctcagctacccccaaagttcgacttgtagagccccatagcccttctccttcaagcaaattcagcacaaaaggcctctgtaagaaaaagttgagtggggaaggggacacagaccttggggccttatccaatgatggctctgatgatggaccctcagtgatggatgaaacaagcaatgatgcctttgattctttagaaaggaagtgtatggaaaaagaaaaatgtaaaaaaccctctagtttaaaacctgaaaagattccttccaagagcctaaagtcagcccgtcccattgcccctgccatccccccacagcaaatctacaccttccagacagccaccttcacagcagcgagcccaggctcttcctcaggcttgaccgccacagtggcacaagccatgcccaacagtccccaactcaagcccattcagcccaagcccactgttatgggagaacctttcacagtcaaccctgccttgactccagccaaggacaagaaaaagaaagacaaaaaaaagaaggaatcttcaaaggaacttgaaagtcctctgacccctgggaaggtgtgtcgagcagaggaaggcaaaagcccattcagggaatcttcaggagatgggatgaaaatggaggggctcctaaatggctcatcagacccccaccaaagccgactggctagcatcaaggctgaagccgacaagatctacagtttcacggacaatgcccccagcccttccattggaggcagtagccgccttgaaaacactacccctactcagcccctgactcccttacatgtggtgacccagaatggagctgaagccagctcagtcaaaaccaacagccctgcatactctgacatctctgatgctggggaggatggggagggcaaggtagacagtgtcaaatcaaaggacgccgaacagttggttaaagaaggggctaagaaaactctttttccccctcagcctcagagcaaagactcaccatattaccaaggctttgagagttactattctccaagttatgcacagtccagccctggggctctgaaccccagcagccaggcaggagtggagagccaggccctgaagacaaaaagggatgaggaacctgagagcatagaagggaaagtgaagaacgatatctgtgaagaaaagaagcccgagctgagcagttccagtcagcagccctcggtcatccagcagcgtcccaatatgtacatgcagtccctgtactacaaccagtatgcctatgtacccccctatggctacagcgaccagagttaccacacccaccttctgagcactaacacggcttaccggcagcagtacgaagaacagcagaaacgccagagcttagagcagcagcagcggggagtggacaagaaggcagagatgggcctgaaggagcgggaggcagcactcaaggaagagtggaagcaaaagccgtcaattccaccaactctcaccaaggcccccagcctgacagacctggtgaaatcaggacctggcaaggccaaggagccaggggctgacccagccaaatcagtcatcattcccaagttagatgactcttcaaaactcccgggccaggcccctgaaggccttaaagtgaagctgagtgatgccagccacctaagcaaggaggcctctgaggccaagacaggtgctgagtgtggtcgacaggcagagatggatccaatactctggtaccgacaggaggcagagccccggatgtggacatatgtttatcctgccaagtactcagacatcaagtcagaggatgagcggtggaaggaggagcgggaccgcaaattgaaggaggaaaggagtcggagtaaggactctgtccccaaggaagatgggaaggaaagcacaagtagtgactgcaagctgcccacgtcagaggagtctcgccttgggagcaaggagccccggccaagtgtccatgtgcctgtgtcctccccacttacccagcaccagtcctacatcccctacatgcacggctattcctacagtcagtcctacgaccccaaccaccccagctaccggagcatgcctgctgtgatgatgcagaactacccaggttcctacctgccttccagctactctttttccccatatggcagcaaggtctcaggtggtgaagatgctgacaaggcacgagccagccccagtgtgacttgtaaatccagctcagagtccaaagccctggacatcttgcagcagcatgccagtcactacaagagcaagtctcccacgataagtgataaaacttctcaggagagagatcgaggaggctgtggggtggttgggggtggtggcagctgtagcagcgtcgggggagcaagtgggggtgaacggagtgttgaccggccccgcacctctccttcccagcgcctgatgtccacacaccaccaccaccaccacttggggtactcattgctcccagcacagtacaacttaccctatgcagcagggctttcttctacagccattgttgccagccaacaaggctcaactccctcactctacccaccccccaggaggtgagaatgacaccaagtgcccggataaagtcagcttcacgggcccggactggcttacccaaggaggtgctgaaggtgccgtttagacatcagttaaatggtgttgatcatcctgtttgccgtttccaccatgactgaaggcagacccttggctatctcacctccaccagacctccggactacctgaccctacctcttcctcaggagctggagagctggtacttagcaaaaatatttattctctcagccacagttatgactattgtggcctctgtggagatgaaggcacgggaagcaaccaggggaacatggcctcagcccagagaagccactgctctgttccccaagcccttggtctgctgctggagcagtaccagcccccccgcccaccagggagggacccccacccccaagcactgggtaaggtctgaagacagcacagcagccatacccctcaccatcattaccaccatcaccagattctgcatctccctagtgctttgcaccctgggaattggcagcatgtggaggaactagaatctcaggaaagaaattgggggttgttttctacataattgtgaaaacaaggtcttcaaatgtggagacttctccccatttacatgagcacatataaacgctcacaacctagcctggaaaggaagaccaaggcatctgccccaacatggccttgagctgcctgtgaggcagggggcaggggttccaacaccagcacagggctccccagggacactgggagcaagctggtgctggagcatgaatgacgtctgtgaagtagaacctgcgtccccactaagtcctgctgcttcttattccccaactccttgcccttttcccttccctcctaaccccttggtgcctttcccagggggatccccacactggtcttgcctcttcttttccactgcttggctcttaagcctcaggcagataaactagtattccccccagcttggggaaccttggagtctgccaggtcaccttagggcaaggcccagaaggcagcccctgggagcacccagcagttcttggagatgtcctgtcatctagccatctgatatcttcctcatttgaggccacagatatatacagcccaattcctctgtctacaagtacatgattttatatagctcagtctataacctccatgtgggccaatataagctgtgtttcttggtaacacatattttgtttgaggggccactggccatgggaggttatttgttccttagaccctggaataacacatccaagccattacttattagagtctcagaatgtactcagtggagctgtgctttgaggcagccaacatttctctgctctccttagaaatgcagtctcccaatggaagctttatactctttgtactgggaaagtgaggatgatttggtagctttattggggtcatgtcttccccaaggtgtggggagcttagcttacttggcttttgaggtatcatccctctgttctcccctcctatctttccatgaccctctggattgagagagagagataaagactgacagacaccagtgtaggctggaaaagggagtgtgtgaccagagtgccaaaagtgactaggagcaggaacttggctccgactcagtttggaaaatgggaaataggggacagtaagcacaatgcccagtagtagttgatttccaaggaccctggaaccctacacttgagaggcttagggtcaccatctgctcaagaggatcccctctgatctacaggccttttccctaggtttctgcctcctcgtttttgttcaagttgggttctgagtcctccccaaaaaccattgttttagacctcttggcagggccccaaaacagcctccctcatacccatcattccctctgccttctgctgccctcatgggcagtgctctgagcagtgacctccctttcctccgtggaagtagctagtgcagacaccgtcatcccaccccacctgagtcaccccaaccaagagggtgactgaatttcagcctgattatgccctcctggggctcctgtgaggtggagccaaggttccctctctgttcctgtttgtttttaaatattgttgtgtgttttgtatctgtggcactggcctgcagcatactctgtatatattgtaaagaaaccgttaggagtaattttcttttgcattgggcaggcatggccctgcattcctgccctttccactcattctgtaacacagaggacgaacttctgtattagctgggcagccttgggttctccagaagagaacaggtttttcttttcctttttaatttttcttcttaaacatttggctctttgatcctcatatccaagtctcccctgaagagtaggagctgctcagaagagcaggtgaaagccaccatggcagatcctgatgcctgccgggcctagtcttccctctgaaataacatgaagcagcagctgtggagattcttgacaagtgctgagtgaaagatttgctgcccacctctacatggggaggagaaacacaggtgggagctacctgtggcatccatgacctagtcagagggatgagatgctcagcaggggtccccatcctatcccaccccacaaacaaaggctggaaaaatttgctaccaagggccaagaccaccagaccaagcctgtttatgagccacccctgcccaggccctcacagacattgctcacggggcttcccatagaggagaagctaaagagggagggggcctcatccccagatagatcaggcaaggcttggagagctgctctttaggatccacatcaactacttcctcattttaaggtatggcagttcccttcatccccttttcctgccttgtacatgtacatgtatgaaatttccttctcttaccgaactctctccacacatcacaaggtcaaagaaccacacgcttagaagggtaagagggcaccctatgaaatgaaatggtgatttcttgagtctcttttttccacgtttaaggggccatggcaggacttagagttgcgagttaagactgcagagggctagagaattatttcatacaggctttgaggccacccatgtcacttatcccgtataccctctcaccatccccttgtctactctgatgcccccaagatgcaactgggcagctagttggccccataattctgggcctttgttgtttgttttaattacttgggcatcccaggaagctttccagtgatctcctaccatgggcccccctcctgggatcaagcccctcccaggccctgtccccagcccctcctgccccagcccacccgcttgccttggtgctcagccctcccattgggagcaggttggggcgagctggaggcccgggctggaggggcagtgttgctgttcatagattttgttccattggcgttgctctgttgaatttaatttcagtcttcctgattcttcccttctgtaaagtgtacattaccaagttccttgtttttttatatatatatataaatatatatatatacaaactgtactctttttgcctttgtacattcaggcaagaagagaaaataaatctttttaagagacaatcacaaatctgtgagggctgctggttatttctcctggagtttgctgctgagctgcctcttccttcctcccaattttcctgttctccctcagctctcctgatcttcctggccctgctccatatgcatcctcagcttcactttccctggctgatggcaagctgttgaatccagtgtccagactacctgccttgtaacccttttctgcccagcattgttttctggcttggccactggcttagcccaggagctttactctgtgccctggcctcccctctcttcacctttagatttccattcaccgaagtggctttggacccctgggtactctgggacctgtttcctggaggccctggcttgggacactcacctgtgaaactatgcagctgggagctctctgcctaagagtttgcactatttaaacctgcctgggagttaggacggatggttttaggaatgaccggaaaactacccctaaaactcccccgacattccagcctctagaatgctctgatccagagctcagtggatgattcccagctggtggactcctgtggctaccccatcagaacaagggctaagggtttatgggtcaagagtatttgatcagaattttaaagggtggtatactctgaaacacagcccaaccaaaccattgtttggccgctttctcttttcctctaccttcctcatccccacttttttccctttctctctacttcctcttcttaattggctttggaattgaaatatatttttaaattatttgttgtatttattgaataaagtttttaatgtccctgttcttaaa

SEQ ID NO: 2485 - DNA, 4807 bp, Homo sapiens
aagtgcgcatgtgcgcgaggagtcgctcgggcacttattgagcgccgactgtctacgggcggccgggggtgatgggcagaggcttcagtgtccccttcgcctccgcaggagaggagaggcagcagcatggcgagtgtcctgtcccgacgccttggaaagcggtccctcctgggagcccgggtgttgggacccagtgcctcggaggggccctcggctgccccaccctcggagccactgctagaaggggccgctccccagcctttcaccacctctgatgacaccccctgccaggagcagcccaaggaagtccttaaggctcccagcacctcgggccttcagcaggtggcctttcagcctgggcagaaggtttatgtgtggtacgggggtcaagagtgcacaggactggtggagcagcacagctggatggagggtcaggtgaccgtctggctgctggagcagaagctgcaggtctgctgcagggtggaggaggtgtggctggcagagctgcagggcccctgtccccaggcaccacccctggagcccggagcccaggccctggcctacaggcccgtctccaggaacatcgatgtcccaaagaggaagtcggacgcagtggaaatggatgagatgatggcggccatggtgctgacgtccctgtcctgcagccctgttgtacagagtcctcccgggaccgaggccaacttctctgcttcccgtgcggcctgcgacccatggaaggagagtggtgacatctcggacagcggcagcagcactaccagcggtcactggagtgggagcagtggtgtctccaccccctcgcccccccacccccaggccagccccaagtatttgggggatgcttttggttctccccaaactgatcatggctttgagaccgatcctgaccctttcctgctggacgaaccagctccacgaaaaagaaagaactctgtgaaggtgatgtacaagtgcctgtggccaaactgtggcaaagttctgcgctccattgtgggcatcaaacgacacgtcaaagccctccatctgggggacacagtggactctgatcagttcaagcgggaggaggatttctactacacagaggtgcagctgaaggaggaatctgctgctgctgctgctgctgctgccgcaggcaccccagtccctgggactcccacctccgagccagctcccacccccagcatgactggcctgcctctgtctgctcttccaccacctctgcacaaagcccagtcctccggcccagaacatcctggcccggagtcctccctgccctcaggggctctcagcaagtcagctcctgggtccttctggcacattcaggcagatcatgcataccaggctctgccatccttccagatcccagtctcaccacacatctacaccagtgtcagctgggctgctgccccctccgccgcctgctctctctctccggtccggagccggtcgctaagcttcagcgagccccagcagccagcacctgcgatgaaatctcatctgatcgtcacttctccaccccgggcccagagtggtgccaggaaagcccgaggggaggctaagaagtgccgcaaggtgtatggcatcgagcaccgggaccagtggtgcacggcctgccggtggaagaaggcctgccagcgctttctggactgagctgtgctgcaggttctactctgttcctggccctgccggcagccactgacaagaggccagtgtgtcaccagccctcagcagaaaccgaaagagaaagaacggaaacacggagtttgggctctgttggctaaggtgtaacacttaaagcaattttctcccattgtgcgaacattttattttttaaaaaaaagaaacaaaaatatttttccccctaaaataggagagagccaaaactgaccaaggctattcagcagtgaaccagtgaccaaagaattaattaccctccgtttcccacatccccactctctaggggattagcttgtgcgtgtcaaaagaaggaacagctcgttctgcttcctgctgagtcggtgaattctttgctttctaaactcttccagaaaggactgtgagcaagatgaatttacttttcttaaaaaaaaaaaaaaaaaaaaaaaaaaagagtttctggctgatgggtgactcagagtgcaggactgcctggccgtggggcagaggggtttgcccttctcggagggtacctcctgttccctgtctgagcatcctgcatggaagtcaaaggaaatccctttcttggtgacgacttaaatctgggttccctcagacattgggttgcaccccaacaaatattaaatggcttcttcttaaagcccagagaaagaggttttttaaaagactgtcgccaaatagctgagccaaaaggctgatcagaattcactttttggaatgtggcagttaaacactaccttgatcattctctcctctttcctcgaggaactcctggagggtttgagcgtctggaaactctctgctctgacccgaggaagcaccctcctgacgccgccttcctccggttattgaaaggacgcctcagaaatgctttgttttcttttacgatgtattcagaagcctttactgattaaagttttcttttatttgggtggccgggagagacccagggaggttctggaggttcctttctgtctcctggccccaccagggatttccccatttctgtttgctgcctgaaagcaggatgaggaaggccaaggagagtccttgcacccgtgagcgtcaggatgaggaaatgacaggaggaagacgtgggtttgggttagtggctgctggcgttttggcccttggtgtttctggagcctccagggatctaggggagcctgggctgcgtgcatgtcgataagcagagctgttcttggggagaaggagggaggtctcgggagtgtagcaccatgccaaccagccctgcgcgaagacagagtgagccacgcccggatggcagggcatgtttctgttttggtgtctcactttcctcccagcgtgacttatttggggattcctcagggcctactggaatgtgactgcccactgcccagctgcctcgggtacaagtcctggccctatgtcccagctgtcaggggctcagggaatcctacccagccacctgtcctgggatggagtgtcagcatccaccccttggttgtcatcgaggccgccctcccagtcctgggtgaagatatttgggccaccagggctcccttggccccttcacgtaggaaatagacacgtgctttttaatgcaggacactttgagtgttacaaaatctgtagacctggcagtagggtcatgatgttgggaagggtgtagtgccctaggttggtgacagaagggacagacacttgtgcacaggtgtctttggtgatggggtttttttttttataacttagtaaaaaaaaaaaaatgtatgtggaattctgtctcttggtaaagctcaaagccaggctagcctgaggtggcgcagggctctccttcctgtcccttcgatctccttgagaattaagagctggcagctgctgatggtgtttcccaacccccctcacttcccaagacaacccccagcttcaggtcctcatggggaggggagggcacgttcttgacacatgggaacttcgctcaggagggcctccccttcccctctccctcagagttttcactgccgtctcgtctttagaaagctgtttgaattccccccgcccccagtttggaccgtgtagatataactggatatacggatttttctctttgtgcaggcttcttatgccgttggtatacagggcaggaaagagaggaataaagggagagagcagtgtggaaaccacggtggttttgctttgttcttactaggttttggtgccaccttccctgcctgcgcttgtgccccctctcctccttggcactggcggcctccttgcctcccttccacccgtgctgccatcccgtgcctgtcgtgttggttcttcacacgtgctctgttctcggggttgttccattcatgccttcttggagggtgagggtggcttgggaaccgacccagtgatcatgcctactttcttctttgtatctccctccttcccagcccacccgggcagcagactctgatggaaggaaggtgccgtaggtgggcttttagaaactaacgggactggttttcaaagcagttatcttgggaaactgtttattccagcgatgtgacttttttcagaatatttcttggaatcatattcagagtctggggctgtgtgttgagcagccttaaggatgctagacactcatttagtgcccagggagtccagcgaatgacgtctgtggccaagcgaggtctcaggtgcaaagcaaaaggaccatttaaagtaaaatagcttggattcaatcatgtgacttttaaattggctcagaaagcaattttgtaatttcagagagtgttttgagccatggccacgttgtcattgtgagtctatagcttgactccttggagaacaatattcatttggttgtggagactgatttgctgggagaaatctgtcctgttactttctggtcatcccaggttctgacttttaccaggggcaaaaaaaaaaaaagcaagagggagataaatcccatctgtgagtttgtcttattggcgcctttttcctcagctgtcttccaagtattatttttactgttaaaaaattttttaaaaatgtgaaatgtaatgtttttacagcaacaatatgaaatatattttataaggaataaaatggtaccttgtctgatttaaaaaaa

SEQ ID NO: 2486 - DNA, 3522 bp, Homo sapiens
aggggcgagtcctgcgcgagtccccgggaggcgccgcgcgcttggaagggacggtcgggcttccccggcccgctgagggctcggcggcgggctcccctcctttccacctcgggagggagggaaggaggggagggaaaagtcccacggaggaggcagaatggccagtcgaggggcgcttaggcgctgcctttccccagggctgcctcgactcctgcacctgtcccgagggctggcctgagacgggactcccggttctcccgctgcgaagcagcgcggccccccggggccggggcagcggcgccggcatgtcgtctggcaccatgaagttcaatggctatttgagggtccgcatcggtgaggcagtggggctgcagcccacccgctggtccctgcgccactcgctcttcaagaagggccaccagctgctggacccctatctgacggtgagcgtggaccaggtgcgcgtgggccagaccagcaccaagcagaagaccaacaaacccacgtacaacgaggagttttgcgctaacgtcaccgacggcggccacctcgagttggccgtcttccacgagacgcccctgggctacgaccacttcgtggccaactgcaccctgcagttccaggagctgctgcgcacgaccggcgcctcggacaccttcgagggttgggtggatctcgagccagaggggaaagtatttgtggtaataacccttaccgggagtttcactgaagctactctccagagagaccggatcttcaaacattttaccaggaagcgccaaagggctatgcgaaggcgagtccaccagatcaatggacacaagttcatggccacgtatctgaggcagcccacctactgctctcactgcagggagtttatctggggagtgtttgggaaacagggttatcagtgccaagtgtgcacctgtgtcgtccataaacgctgccatcatctaattgttacagcctgtacttgccaaaacaatattaacaaagtggattcaaagattgcagaacagaggttcgggatcaacatcccacacaagttcagcatccacaactacaaagtgccaacattctgcgatcactgtggctcactgctctggggaataatgcgacaaggacttcagtgtaaaatatgtaaaatgaatgtgcatattcgatgtcaagcgaacgtggcccctaactgtggggtaaatgcggtggaacttgccaagaccctggcagggatgggtctccaacccggaaatatttctccaacctcgaaactcgtttccagatcgaccctaagacgacagggaaaggagagcagcaaagaaggaaatgggattggggttaattcttccaaccgacttggtatcgacaactttgagttcatccgagtgttggggaaggggagttttgggaaggtgatgcttgcaagagtaaaagaaacaggagacctctatgctgtgaaggtgctgaagaaggacgtgattctgcaggatgatgatgtggaatgcaccatgaccgagaaaaggatcctgtctctggcccgcaatcaccccttcctcactcagttgttctgctgctttcagacccccgatcgtctgttttttgtgatggagtttgtgaatgggggtgacttgatgttccacattcagaagtctcgtcgttttgatgaagcacgagctcgcttctatgctgcagaaatcatttcggctctcatgttcctccatgataaaggaatcatctatagagatctgaaactggacaatgtcctgttggaccacgagggtcactgtaaactggcagacttcggaatgtgcaaggaggggatttgcaatggtgtcaccacggccacattctgtggcacgccagactatatcgctccagagatcctccaggaaatgctgtacgggcctgcagtagactggtgggcaatgggcgtgttgctctatgagatgctctgtggtcacgcgccttttgaggcagagaacgaagatgacctctttgaggccatactgaatgatgaggtggtctaccctacctggctccatgaagatgccacagggatcctaaaatctttcatgaccaagaaccccaccatgcgcttgggcagcctgactcagggaggcgagcacgccatcttgagacatcctttttttaaggaaatcgactgggcccagctgaaccatcgccaaatagaaccgcctttcagacccagaatcaaatcccgagaagatgtcagtaattttgaccctgacttcataaaggaagagccagttttaactccaattgatgagggacatcttccaatgattaaccaggatgagtttagaaacttttcctatgtgtctccagaattgcaaccatagccttatggggagtgagagagagggcacgagaacccaaagggaatagagattctccaggaatttcctctatgggaccttcccagcatcagccttagaacaagaaccttaccttcaaggagcaagtgaagaactctgtgaaggatggaactttcagatatcaactatttagagtccagagggagccatggcactagaaatagttgataatgaaatgagattttatgaagtataccgctccacctatgagcgtctgtctctgtgggcttgggatgttaacaggagccaaaaggagggaaagtgtgaagaataaagtagatctgagaaattctgagccaatcaggcttcttaattcaagagacaaaccaagacgttctgtcaactgtgctgtgctcttctttaagccaatgaaccccaattcctggcagtctacaagaagtctcttaatgctaatgaagaatttaaaggtctttttaaggaaatgaagggctttccaaatagaatgatttactctgaagaaacaaacaatggtatctctgaaactcacaacctaaagcccaatcttgaaaatatgttgtgcaccaagacgactgcttcagcttcttctcttatccttactttctttaatagatatttattaaactgtccagtgaaaaggtgccacaatgcccagtattgtaaacaacaggtttgcattcatgaagctttcattcattctggagtctactaatttacctgaatggtgtttgcattctgtgaaatgcctctccacgttgcatatgtcacacttttgtctgcacataactcttttttcacaagaagggtcactgccacaacagcacagtcagcgggtgaattacaggtgcctgctgcctgcctacctgggtaatctgatcttgtctgtatcgccgtgtgctcatcactgaagaattgcaggccactcatgtcagtgaccagatttgtggcttataaacattagcagtttatttatgttttaagatgcaaagatgtgtgtttgatattcactttaataattagaaatggatcttgtaaacagggcatatatcaaagatgaccttataatatgtacccgaatatacagttcaagaattttgtctgactggaaataaatgcattttgtagcaaaaggaaaaaaaaaaaaaaaaaa

SEQ ID NO: 2487 - DNA, 1764 bp, Homo sapiens
agctctgggagaggagcccagcactggaagtcgccggtgtctccattcggtgatcagcactgaacacagaggactcgccatggagtttgggctgagctggattttcttcgttggtcttttaagaggtgtccagtgtcgggtgcagctggtggagtctggggggggcgtggtccagcctggggggtccctgagactctcctgtgcagcctctggcttccccttcattaattaccctatgcactgggtccgccagactccgggcaagggactcgagtgggtggcacttatttcgagtgatgggagtcgccaattctacgcaggctccgtgaggggccgattcaccatctccagagacaattccaagaatagactgtctctcctacttaaccgcctgagagaagacgacacggctgtctatttttgtgcaagaagcgatcaggccagaccacaatataatatttggggttcttccacttctgacttctggggccaggggaccctggtcaccgtctcctcagcacccaccaaggctccggatgtgttccccatcatatcagggtgcagacacccaaaggataacagccctgtggtcctggcatgcttgataactgggtaccacccaacgtccgtgactgtcacctggtacatggggacacagagccagccccagagaaccttccctgagatacaaagacgggacagctactacatgacaagcagccagctctccacccccctccagcagtggcgccaaggcgagtacaaatgcgtggtccagcacaccgccagcaagagtaagaaggagatcttccgctggccagagtctccaaaggcacaggcctcctcagtgcccactgcacaaccccaagcagagggcagcctcgccaaggcaaccacagccccagccaccacccgtaacacaggaagaggaggagaagagaagaagaaggagaaggagaaagaggaacaagaagagagagagacaaagacaccagagtgtccgagccacacccagcctcttggcgtctacctgctaacccctgcagtgcaggacctgtggctccgggacaaagccaccttcacctgcttcgtggtgggcagtgacctgaaggatgctcacctgacctgggaggtggctgggaaggtccccacagggggcgtggaggaagggctgctggagcggcacagcaacggctcccagagccagcacagccgtctgaccctgcccaggtccttgtggaacgcggggacctccgtcacctgcacactgaaccatcccagcctcccaccccagaggttgatggcgctgagagaacccgctgcgcaggcacccgtcaagctttccctgaacctgctggcctcgtctgaccctcccgaggcggcctcgtggctcctgtgtgaggtgtctggcttctcgccccccaacatcctcctgatgtggctggaggaccagcgtgaggtgaacacttctgggtttgcccccgcacgcccccctccacagcccaggagcaccacgttctgggcctggagtgtgctgcgtgtcccagccccgcccagccctcagccagccacctacacgtgtgtggtcagccacgaggactcccggactctgctcaacgccagccggagcctagaagtcagctatgtaacagaccatggccccatgaaatgatcccggaccagatccgtccacacccgccactcagcagctctggccgagctcacagtacaaccacaataaactcttgttgaatgaactctagg

SEQ ID NO: 2488 - DNA, 3420 bp, Homo sapiens
gctgcctcctctgactgttatgcagcaggccggcaggtcaataaacttgcttgcctgactttgagtatactcgtcttttctcttggccaaccttacggtagctgtaccagtttgcatttccaccagcaatgaatgagagttcctgttgctctgcatcctcaccagcatttggtgtggtcagtattttggattttcaccattctaatagagattcacggatccatccgggtggtccgggcaccactggcgcccctctgcggctattccccagttccattttctgaagccacaggtcagaagccgctgtacaacgctttgccgaactccagaatcttgaaggagacgtaaggtgcagccacctgccgcgcaggcgcaagcctttctttcggcacaaagaccgtgggaggaggggtcggcgcaagcgctcggtgtctctctgaaaagaacttcatcatactgcctcctggctgacggagcgcagcgcaacgcatgcgccttgaagacttatggaacttatttcacgctcagggcggcggtgacgtgtgaacgagaaggaggtggtcaaggaacggaagccgggagggaacgagggcggaagcggaccagggccaggcttgtgttcgcagccttgccggggctggggttccgatgtggtccccggagcgggaggccgaggccccagccgggggagacccggcgggccttctgccccccgagtgggaggaggacgaggagcgcatgtccttcctgttctccgctttcaagaggagtcgcgaggtgaacagcaccgactgggacagcaagatgggcttctgggcgccgttggtgctgagccacagccgccgccagggggtggtgcgcctgcgtctgcgggacttgcaggaggcctttcagcgcaaggggagcgtcccgctggggctggccacggtgctgcaggacctgctgcgtcgaggggagctgcagcgggagtcagacttcatggccagtgtagacagcagctggatctcctggggggttggggtcttcctgctgaagcctctcaagtggactctttctaacatgctgggagataataaggttccagctgaggaggtccttgtcgctgtggagctgttgaaggaaaaggctgaggaggtgtatcgtctgtatcagaactcgcccctctcctcccaccccgtggtggccctgtcagagctcagcaccctctgtgctaactcctgcccagatgagaggaccttctacttggtgttgctgcagctgcagaaggagaagagggtcacagtcctcgagcagaacggggagaagattgtgaagtttgcccgagggccacgtgccaaggtctctccagtcaatgacgtagatgttggggtgtaccagctgatgcagagtgaacagcttctctcacgcaaagtggagtccttatcccaggaagcagagaggtgtaaagaagaagcccgccgggcatgccgagcaggaaagaagcagctggcactgaggtctctcaaggccaagcaacggacagagaagcgcatcgaggccttgcatgccaagctggacactgttcaaggcatcctggaccggatctatgcctcccagacagatcagatggtttttaacgcctaccaggctggggtaggagcactcaaactctccatgaaggatgtcacagtggagaaggcagagagcctcgtggatcagatccaagagctctgtgacacccaggatgaagtttctcagactctggctggtggggtaacaaatggcttagattttgacagtgaagaactggagaaggaattggacatcctccttcaggataccaccaaagaacctttggatctgcctgacaacccccgcaataggcattttaccaacagcgtgcctaaccctaggatctcagatgctgaacttgaagctgaacttgagaaactgtccttatcagagggaggtttggtcccaagcagtaaatctccaaaaaggcaattggaaccgactctaaagccattgtaggaccctcaagtgaaggaccctcatgtaaaagagagaccaggcttgctgggtgtgtacatagttatttaaacaagaaactctcagaatgtgtttggaagaggagaaaggagaaccactgattttatctggatgctactacttactacaggacagatagaatttctggaagcgatgctccaaaggcttgctcccagctgtatcatggacctgccttctcatctttatagtgccacgatttatacagtcctgtgtctgacctgtcatttcatagcctgcagttcttgccattggcacacttagatttgtcttcacccaccagcttcgttccagcccatgaaggggaaagatttgcagctttgccaaatctgaatcagttcccactcccccctgcggttttttagaggggtttatcctgtcgctaatgtcagttaaatagcttattcctgtcccacttgatttcactggtaagaatgagaatgaaatacttaaaggttttatttgaggggacttagctgccattttatggaaaaacatgtagtataaaaggtttttctccagggtcatttgacagaattctccaggtgttcagagaaagaggtcgccccaagtggcccagagtcgtgacagtccggaggggctggtgtggccggtgggcgctgcctcttcatctgatggagccaggaggtccgccggtgggggaaaggcttcttccgaggcttctgcactcgcctgggaagaggcccagtcactacaggaccctgagatgtccagaccccttatgcaaagaggcaaaattgttgccttggccccatcatggagtaacttaaaaatacatatctatcttccagaacaagccacacaacaacacacctcccctccttgagcctggcacacagcaccgggctctctgaatttggaaagtgtttcattttgtggcctactgctcggggcaggggggctgagccaggatgtgcaatagaagcaggggttgtcccctctgccagatctgtggggagctgcccaggccacccgtgcacctgtcctgcttcctgcagtccccactccctgcctcctttgagggactgggggacttggggtagggggacagacgggaaagggtctgaatgctctggcaatggcgagaagaagcgatcgccacactgccactctgctgcccagccaccaggatttctgcctggagccctttgccctgtccctgctgcctgaggtggcgtagagcagaggagaagaatttgctccaggccaggagcacaaatcgttgttcaatgaatttctctccaactcgaccttggtaaacggaaatgttgggggtgaagagaaacaatcactatttttttcttttttatctggtaaataattaaaagaaaaaccgaacacttaaaaaaaaaa

SEQ ID NO: 2489 - DNA, 774 bp, Homo sapiens
ggcctgagtgcgcctgcgcagtccgcgccactcagggagccggaggggacgcgccggaggaaagatggaagactaccaggctgcggaggagactgcttttgttgttgatgaagtgagcaacattgtaaaagaggctatagaaagcgcaattggtggtaacgcttatcaacacagcaaagtgaaccagtggaccacaaatgtagtagaacaaactttaagccaactcaccaagctgggaaaaccatttaaatacatcgtgacctgtgtaattatgcagaagaatggagctggattacacacagcaagttcctgcttctgggacagctctactgacgggagctgcactgtgcgatgggagaataagaccatgtactgcatcgtcagtgccttcggactgtctatttgacctgcagtccagcctatggcctttctccttttgtctctagttcatcctctaaccaccagccatgaattcagtgaactcttttctcattctctttgttttgtggcactttcacaatgtagaggaaaaaaccaaatgaccgcactgtgatgtgaatggcaccgaagtcagatgagtatccctgtaggtcacctgcagcctgcgttgccacttgtcttaactctgaatatttcatttcaaaggtgctaaaatctgaaatctgctagtgtgaaacttgctctactctctgaaatgattcaaatacactaattttccatactttatacttttgttagaataaattattcaaatctaaaaaaaaaaaaaaaaaa

SEQ ID NO: 2490 - DNA, 1064 bp, Homo sapiens
gtgcaagggagtgcgcgcgggtgggagcgccaggggctggcggggcccgcgccctgggacgagcccctcatgctcaggctctgcgctcccgcagcgcccacgcagccgagaggagtgggtgatgacttcgtgacctcaacgtcctccccagtccctcgacatgttcccgcgcctgaaaggtgcagaaaactccccccaccgctctggacgagactgagctaggcgtcgagggcgggcgccgccgcagaccggagctcgggctcgctggccgctcaggcgcagcggtgtggagggaacggacgcgcggcaaggcgacccgctctgggcaacgcgggcgcagctgccccgacgcaaggcactagctggtcgggggctcgggcgagccggggccggcgtgccggggcgtgcgctctctcggcaggcgagcgccgggctccgcggaggtccctgcgcccactgcctgcttctccgcccggcgacccggagtccccaggctgcggtgcgccaggccagacctgaccgagggcggaagacccgagcggcagggaggcagaaagaaaagagtgagaggcagaaggaagaaagaggagaaagagaagacaaatgtttttcccttcttgaagaggtggtcttgactactgctcaaccacagcctactgaaagagccctggaaaatctgagttctagatctgcctgtaccactgtgggacccaagcaaaggactgggagacagaagccttcagtttgaatttcagattcttgaagactaactttctcaatcatattctcgggaaagtaactatgtgttcatttctaagaatcatgtgaagatggctctgtctactgagaatcgacttcaaatgcatgctactaaaatggagctaatatgcgtcatttcctcagctataatttggggaggttaatacttgttaaatcactagactgctataaggtttgcccataaacattgtaaataatgtattcaaaattattaaaatgttacaatataaacaagaatgtgatataataaaatgtaattatataaagaaaaaaaaaaaaaaaaa

SEQ ID NO: 2491 - DNA, 1498 bp, Homo sapiens; identical to SEQ ID NO: 327

SEQ ID NO: 2492 - DNA, 1560 bp, Homo sapiens
tagcgggccgaggccccgggggagcggggccgcagctgggggggcgggagcccgtggggagccgagccgagcgccccccgccccagcccccggcatgggcagtacggggccgccggggcgggcgccgagcgctgagcgctgagggtctcccatgggattgctgggatcttgctgggtgagatggcagtgtgtgcaaaaaagcgccccccagaagaagaaaggagggcgcgggctaatgaccgagaatacaatgagaaattccagtatgcgagtaactgcatcaagacctccaagtacaatattctcaccttcctgcctgtcaacctctttgagcagttccaggaagttgccaacacttacttcctgttcctcctcattctgcagttgatcccccagatctcttccctgtcctggttcaccaccattgtgcctttggttcttgtcctcaccatcacagctgttaaagatgccactgatgactatttccgccacaagagcgataaccaggtgaataaccgccagtctcaggtgctgatcaatggaatcctccagcaggagcagtggatgaatgtctgtgttggtgatattatcaagctagaaaataaccagtttgtggcggcggatctcctcctcctttccagcagtgagccccatgggctgtgttacatagagacagcagaacttgatggcgagaccaacatgaaagtacgtcaggcgattccagtcacctcagaattgggagacatcagtaagcttgccaagtttgacggtgaagtgatctgtgaacctcccaacaacaaactggacaaattcagcggaaccctctactggaaggaaaataagttccctctgagcaaccagaacatgctgctgcggggctgtgtgctgcgaaacaccgagtggtgcttcgggctggtcatctttgcaggtcccgacactaagctgatgcaaaacagcggcagaacaaagttcaaaagaacgagtatcgatcgcctaatgaataccctggtgctctggatttttggattcctggtttgcatgggggtgatcctggccattggcaatgccatctgggagcacgaggtggggatgcgtttccaggtctacctgccgtgggatgaggcagtggacagtgccttcttctctggcttcctctccttctggtcctacatcatcatcctcaacaccgttgtgcccatttcactctatgtcaggtatgtgccttctctgacctggggtctctccagggagtcaggcggtcccatagaacttttcttttctatgaagatgaagtccttgagaagtaacgagaagtcctcttcttcctgtactgtaaacatttgatgttatctgtttatctttgtgggcagagcaaactttttaccacagtttcctggtacttgggactgtattagagaaaaaaaaatattgatttattcagcacctatttattacatgcctactgtgtacaaagaagtgtgctaggtgccatcacaaataaaagatgaattaggaaaaaaaaaaaaaaaaaaaaaaaaaaaaaaaaaaaaaaaaaaaaaa

SEQ ID NO: 2493 - DNA, 1126 bp, Homo sapiens; identical to SEQ ID NO: 1930

SEQ ID NO: 2494 - DNA, 3757 bp, Homo sapiens; identical to SEQ ID NO: 2293

SEQ ID NO: 2495 - DNA, 1844 bp, Homo sapiens
aagggctcgcacccagcccatgctgactccagttgtccttgactgcatggtttctgctggtccaagcaaacttctcctgccacgcctaaccttggagagcagtgatcaatggaggaagtgtttcatggtggacatgggaaactggccagatcaactgctgtcaccttctaaagagagggttttgccatgttgccaggctggtctcgaactcctggactcaagtgatctgcctgcctcagcctcccaaagtgctggaattataggacccagacggggaggaggaatgccagagaagctgcagactctccggccacggagcctgagtggagcagaggtggcccactgtcagccacaggtcaagtgtcagggtggggacggggcaggctccaccagaaggcgggggcaggctccaccagaaggcggggccagaccacagggcaaggtggagatgagtctgtggcacccccaggaagtttaccagatttgccccagagcttctgaccctttggatctctctgggctgcattcttcagggtcccattgcttctttcttgaaggtggaaggaaatgttcccatcagagccttccaacaggccaccttgggggcttctcctgagagctccttgtgcacacaccccttcagggtggcttgggttgcgccctcagaccccagtggggggccgtatggcatcctccttggtcagcaagtgagccacagcagcaggcccctcacagacctcagcctggggccacaggtcccttctccccatctccgcatctggagaagcaacctgtggagcagccaagagtggcagccctggctctctacagcattcattttcagggcaagacagagcatttccactattatgctcccccccccggccttttttttttttttttgagacagggtctcactctgttgcccaggctggagtgcggtggcgcaatcatggctcactgcagcctcgaccttctggggtcaagtgatcctcccaattcagcctccaaatttctttaaacaaaaaaaaatgcaagaaaggcaaaacaagatatttatctgggctgagagggtaaagagaagctctatctttgagctgagacacaaaatggaaagaagaggcagcagcagcggcagtagcagttctgcctttccaaaccttccctatctaagtgctttcaagatatgctgaaagtcatgaattgaagtgtggttcccacggctttagtccttgtatgaaggtccttttgctagaacttacttcctttccagcccatatggttgacctgggggtccaggcagttctcaagggaaccacaggattccatgtgatctgggatcccagttgatgatccctcttctggtcacaagctgaattggacccaaatctgcaccctaaactcccctcttgccagatcctgcccagtcagtgccgtcccctcagactgggtgggcagcctgggcttcctgctgagacgggacccccccctctcttcttgatctcactcccaggaaagacactgaaggagcagaggtgtggacgccacatactggacggggtttcaccatctgctgggacgggacaccctctcttcttgatctcactcccagaaaagacactgaaggagcagaggtgtggacgcctcatactgctagagacggggtttcaccgtgttagccaggatggtctcaatctcctgaagtcgtgatccacccgccttggcctcccaaagtgctgggattacaggcgtgagccactgcacccggctgaaattgtatactttaaagggatgaattttatggtatgtgaattatgtctcattaaaaaaaacaaactgttaag

SEQ ID NO: 2496 - DNA, 2421 bp, Homo sapiens
cagcagaatggaagtgaggaaaggcaaccagctgacacaggagccagagtgagaccagcagactctcacactcaacctacaccatgaatttgtgtctatcttctacgcgttaagagccaaggacaggtgaagttgccagagagcaatggctctcttcactccgtggaagttgtcctctcagaagctgggctttttcctggtgacttttggcttcatttggggtatgatgcttctgcactttaccatccagcagcgaactcagcctgaaagcagctccatgctgcgcgagcagatcctggacctcagcaaaaggtacatcaaggcactggcagaagaaaacaggaatgtggtggatgggccatacgctggagtcatgacagcttatgatctgaagaaaacccttgctgtgttattagataacattttgcagcgcattggcaagttggagtcgaaggtggacaatcttgttgtcaatggcaccggaacaaactcaaccaactccactacagctgttcccagcttggttgcacttgagaaaattaatgtggcagatatcattaacggagctcaagaaaaatgtgtattgcctcctatggacggctaccctcactgtgagggaaagatcaagtggatgaaagacatgtggcgttcagatccctgctacgcagactatggagtggatggatccacctgctctttttttatttacctcagtgaggttgaaaattggtgtcctcatttaccttggagagcaaaaaatccctacgaagaagctgatcataattcattggcggaaattcgtacagattttaatattctctacagtatgatgaaaaagcatgaagaattccggtggatgagactacggatccggcgaatggctgacgcatggatccaagcaatcaagtccctggcagaaaagcagaaccttgaaaagagaaagcggaagaaagtcctcgttcacctgggactcctgaccaaggaatctggatttaagattgcagagacagctttcagtggtggccctcttggtgaattagttcaatggagtgatttaattacatctctgtacttactgggccatgacattaggatttcagcttcactggctgagctcaaggaaatcatgaagaaggttgtaggaaaccgatctggctgcccaactgtaggagacagaattgttgagctcatttacattgatattgtaggacttgctcaattcaagaaaactcttggaccatcctgggttcattaccagtgcatgctccgagtccttgattcatttggtactgaacccgaatttaatcatgcaaattatgcccaatcgaaaggccacaagaccccttggggaaaatggaatctgaaccctcagcagttttataccatgttccctcataccccagacaacagctttctggggtttgtggttgagcagcacctgaactccagtgatatccaccacattaatgaaatcaaaaggcagaaccagtcccttgtgtatggcaaagtggatagcttctggaagaataagaagatctacttggacattattcacacatacatggaagtgcatgcaactgtttatggctccagcacaaagaatattcccagttacgtgaaaaaccatggtatcctcagtggacgggacctgcagttccttcttcgagaaaccaagttgtttgttggacttgggttcccttacgagggcccagctcccctggaagctatcgcaaatggatgtgcttttctgaatcccaagttcaacccacccaaaagcagcaaaaacacagactttttcattggcaagccaactctgagagagctgacatcccagcatccttacgctgaagttttcatcgggcggccacatgtgtggactgttgacctcaacaatcaggaggaagtagaggatgcagtgaaagcaattttaaatcagaagattgagccatacatgccatatgaatttacgtgcgaggggatgctacagagaatcaatgctttcattgaaaaacaggacttctgccatgggcaagtgatgtggccacccctcagcgccctacaggtcaagcttgctgagcccgggcagtcctgcaagcaggtgtgccaggagagccagctcatctgcgagccttctttcttccagcacctcaacaaggacaaggacatgctgaagtacaaggtgacctgccaaagctcagagctggccaaggacatcctggtgccctcctttgaccctaagaataagcactgtgtgtttcaaggtgacctcctgctcttcagctgtgcaggcgcccaccccaggcaccagagggtctgcccctgccgggacttcatcaagggccaggtggctctctgcaaagactgcctatagcagctacctgctcagccctgcaccatgctgctggggaagacagtggcccc

SEQ ID NO: 2497 - DNA, 5458 bp, Homo sapiens; identical to SEQ ID NO: 586

SEQ ID NO: 2498 - DNA, 5426 bp, Homo sapiens; identical to SEQ ID NO: 2474

SEQ ID NO: 2499 - DNA, 2276 bp, Homo sapiens; identical to SEQ ID NO: 2292

SEQ ID NO: 2500 - DNA, 6001 bp, Homo sapiens
cgctgtggagccgtggtcgcgctgtgtgtgtgtgtgagtggagagtgagtgcgggacctgaggctgtgtgtgtgtgaactgtggccactggcggggtcgggggggggcagcggcggagccgcctcggacgataaggaaattgagatttggagaagttaaataaccaagacttcacaggcaaagccatgactacagtagtggtacatgtggactccaaagctgagctcactaccctgctggagcagtgggaaaaggaacatggcagtgggcaggacatggtacctatccttaccaggatgtctcaattgattgaaaaagaaactgaagagtatcgtaaaggggatccagacccatttgatgatcgacatcctggtcgagctgatccagagtgtatgctgggccacttgctgagaatactcttcaagaatgatgatttcatgaatgcactggtgaatgcatatgtgatgacaagccgagagccccctttaaacactgcagcttgcagactcctattagacatcatgccagggctggaaactgctgtcgtctttcaagaaaaggagggaattgtcgagaatcttttcaaatgggcccgagaggccgatcaaccattgaggacatattctactggactgttaggaggtgctatggaaaatcaagacattgctgccaactatagagatgaaaattcacagctggtggcaatagtgcttcgaagactgagggagctacagctacaggaagtggctttgcggcaggaaaacaagcgtcccagtccacggaagctctcttctgaaccccttttgcctctggatgaggaggctgtggatatggactatggtgacatggctgtagatgtagtggatggagaccaagaggaagcttctggagacatggagatctcctttcatcttgattcaggccacaagactagtagcagagtgaactcaacaaccaaacctgaggatggaggattaaagaaaaacaagtcagcaaaacagggtgacagagagaactttaggaaagccaagcaaaagttgggtttctcatcttctgatccagatcgcatgtttgttgagctgtctaatagcagttggtcagaaatgtctccctgggtgattggcaccaattataccctttatcctatgactcctgctatcgagcagcgactcattctccaatatttgacccctctaggagaatatcaggagctacttcccatattcatgcaacttggatcacgggagctgatgatgttctatattgacctgaagcaaactaatgatgtcctgcttacatttgaggcactaaagcacctagcatctctcctgctccataacaaatttgccacagaatttgttgcgcatggtggagtacagaaattactggaaatacctcgtccttctatggctgcaaccggtgtgtctatgtgtttgtattacctatcctacaatcaggatgccatggaaagagtttgcatgcatccccacaatgttctgtctgatgtggtgaactataccctgtggttaatggagtgttctcatgcttcaggatgctgccatgctaccatgtttttttcaatttgcttctcatttcgggccgtcttggagctctttgaccgctatgatggtcttcgtcgtctggtgaacttgatcagtactttggagattctaaatttggaagatcagggtgcacttctgagtgatgatgaaatatttgctagccgccaaactgggaaacatacctgcatggccttgcgcaaatactttgaggctcacctggccattaaattggaacaagtgaagcagtcacttcagaggactgagggtggcattcttgtccacccacaacccccgtacaaggcatgctcatatactcatgaacagattgtggaaatgatggaatttttgatagaatatggcccagcgcagctatattgggaaccagctgaagttttcctcaaactttcttgtgtgcaactcttgttgcagcttatttctattgcctgcaattggaagacctattatgcaaggaatgacactgtgcgctttgctttggatgtcctggctattcttactgtggtgccaaaaatccagctccagttggcagaatcagtggacgtgttggatgaggctggatctacagtctctactgtaggtatcagcattattttgggagtggctgagggtgagttcttcatccatgatgctgaaattcagaagtcagcacttcagattatcatcaattgtgtgtgtggcccagataaccgaatatccagtattggtaaatttatctctggtactcctcggagaaagctgcctcagaaccctaaaagcagtgagcacaccctggccaagatgtggaatgtggttcagtccaacaacggcatcaaggtgctcctgtccttactgtccattaagatgcccatcacagatgcagaccaaatccgggccctggcctgcaaagccctagtgggcctgtctcgcagtagcactgtccggcagatcatcagtaaactgccccttttcagcagctgccagatccagcagctgatgaaggagcctgtgctgcaggacaagcgcagtgaccatgtcaagttctgcaagtatgctgctgaactcattgaacgggtgtcaggaaaaccacttctcattggcactgatgtttccctagcacgactgcagaaagcagatgttgttgcccagtcaaggatctccttccctgagaaagagctgcttttgttgatacgaaaccatcttatttctaaagggcttggagaaacagcaaccgtgctgacaaaagaggctgacctgcccatgactgctgcctcccattcttctgcctttaccccagtcactgctgctgcttctcctgtctctctaccccgaacccctcgtatcgctaatggcattgcaactcgtctgggcagccatgctgctgtgggtgcctctgcgccttctgcccctactgctcatcctcagccacggcccccccagggtccgctagctctgcccggcccatcttatgcaggcaactcccctttgattggtagaatcagttttatcagagagaggccatcaccctgcaatggcaggaaaatcagagtgttgcggcagaagtcggaccatggtgcctacagccaaagcccagccataaaaaaacagctggacagacatcttccttccccacctacgctggacagtataatcacagagtatcttagagaacaacatgctcgctgcaagaatccagttgccacctgcccacctttctccctctttactcctcaccaatgtcctgagccaaaacagaggcggcaagcgccaataaactttacgtcaaggctaaaccgcagggcatcatttccaaagtatggaggggtggatggcggatgctttgataggcaccttatctttagcagattccgtcctatttcagtgttccgggaagccaatgaagatgagagtggcttcacctgctgtgcattctcagcacgggagcggttcctgatgcttggcacctgcacagggcagctgaagctctataatgtgtttagtggacaggaggaggccagctataactgtcacaactcagccatcacacatcttgaaccttccagggatgggtccttgctgctgacatctgctacttggagccagcctttgtctgcactttggggaatgaagtcagtatttgatatgaagcattccttcacagaagatcactatgttgagttcagtaagcactcccaggatcgggtcatcggcacaaaaggagacattgcccacatttatgatattcagactggcaacaagctgttgactctgtttaacccagatcttgccaacaactacaagaggaactgtgccacctttaatcctacagatgatcttgtcttaaatgatggcgtcctctgggatgtccgctctgcacaggccatccacaagtttgacaagttcaatatgaacatcagtggtgttttccatccaaatggactggaggtgatcattaatactgagatttgggaccttcgaacttttcatcttttgcatactgttcccgctctggatcagtgtcgcgtggtgttcaatcacacgggaacagtgatgtatggagctatgttgcaggcagatgatgaagatgacttaatggaagagaggatgaaaagcccctttgggtcatccttccgaacatttaatgcaactgactacaaacctatagcaaccattgatgtgaaacggaacatctttgacctgtgtacagacaccaaagactgctatcttgctgtcattgagaatcaaggcagcatggatgccctgaacatggacacagtatgcaggctgtatgaagtgggcaggcagcgtctggcagaggatgaggatgaagaggaggaccaggaagaggaagaacaggaggaagaagatgatgatgaagatgatgatgacaccgatgatttagatgagcttgacactgaccagttgctggaggcggagttggaggaggacgacaataatgagaacgcaggggaagatggggacaatgacttctctccctctgatgaggagctagcaaaccttctagaggagggagaggacggggaggatgaagactctgatgcagatgaggaggtggaactgatcctgggggacactgacagctctgacaactctgatttggaagatgacatcatcttatctctgaatgagtgaggagccatcactgcttggaagagattcttggcagagagaagaggggacaaatttggttgtgaagtaaacaagaaacacaagacggctaaaactctccaggggcaggtaaagccctgctgggctcagaagcactatagaatttgctgtacacactgaagtgggtctgtgtcacacaggtatttcttggtcctctggagagcagaggactcactcagctctttgcttcatgcctcgctttaatggtagtaaacacttaaccagtggaatagtctgactgctggtactgatggcatcagaagaaaacaggttaacaatcaagtagtgaaagcactatattctagtcattaactcaacggagccagtctcaactctgctgggagcacccacaggtctctgtgggggagacagggactataacagggaggcagaattcaggttggcttgacaacacaccttaggaacatgtgctaaggggctaaggaggcatcagctgtcttccttattctaccagggctgaaaatcggagtcacttaggaggcagcatgagaacagtggcacaccaccagtgaggcacatgttgcctttttgtctttaagcaacaccttagacagggcctgaaccctgggtgggggcactggatgcctgaagtaagtaagttttctcagtggggcagtctcataaaatcaccaggacattgaccacctgacctcccctaactagtgctggccaaggcctgagagttcacagaacctgctaggtcttaagagccaaaggaaggaagtggttgagggccaggaaagagaaggaatgtcatgccagggtgttactcctcaccaaaacttggcagttctttttggggccatgggacacctttctctgaagaggggttggataaggcaaaggttgaagtgtcttctctaggcacgttttctagcatgtttccttttacttggttctgtctcacaaagctgggaggtagatgattcttccgggtcctgagcacctgcttcatgaaggaagataggtagcccagagaagaagttttggacttaacaacataccaaggcagctctggcctgtgactcaggcgtttgttggagagctgcaggaaaaccactgcagtgtgcctgcaacaggacaagacccactcctgtttctggcggtaccagctaccctggaatggtggcgtgtcctgctgtacccaactgacttgcttaggtacctggcagctgtgaccacagctcaagtaaaaaaacaaaaacaggcaaataaataaacatgcttaacatgtc

SEQ ID NO: 2501 - DNA, 2797 bp, Homo sapiens
gtaacccgttggctgttccttttggtacgctccaagatggctgcctccatagtgcggcgcgggatgctcctggcgcggcaagtggttcttcctcagctctctcctgcaggtaaaagatacctgctttcttcagcctatgtagacagccacaaatgggaagcaagagaaaaagaacattactgtcttgctgatcttgcatctttaatggataaaacatttgagagaaagttgcctgttagttctttaacaatatcacggcttatagacaacatttcctctcgggaagagatagatcatgcagagtattacctttacaagtttcgacacagccccaactgctggtacctgagaaactggactatccacacctggattaggcagtgtctaaaatatgatgcacaagacaaagccctatatacccttgtaaataaggttcaatatggaatttttccagataactttacattcaatttactgatggattctttcataaagaaagaaaattacaaagatgctttatctgtggtttttgaggtcatgatgcaagaagcctttgaagtgccttccacccaacttctctccctctatgttttatttcattgcctggcaaagaagacagacttcagttgggaagaggagaggaactttggtgcatcccttttgcttccaggcctaaaacaaaagaactcagtgggtttcagttcccagttgtatggctatgcacttcttgggaaggtggagttgcagcaagggctacgggctgtgtaccacaacatgcctctgatatggaaaccaggctaccttgacagagcccttcaagtgatggagaaagtggctgcctccccagaagacataaagctgtgtagagaagcgctcgatgtgctgggtgcagtgctgaaggctctgacttcagctgatggggcttcagaggagcagtcccaaaatgatgaagacaaccaggggtcagaaaaactggtggagcagttagacatcgaggaaacagagcagtccaagcttcctcaatacctggaacgatttaaggccttacattctaagcttcaagctctgggcaaaattgagtcagaaggtcttttaagtctgaccacccagcttgtcaaggaaaaactctccacctgtgaagcagaggacatcgccacctatgagcagaatctgcagcagtggcatctagaccttgtacagttgatccagagagaacagcaacagagggagcaagcgaagcaggagtaccaggctcagaaagcagcaaaggcatctgcctaatagggtcccccagggccccacctgtctcacaagaacttcactcaaccccgtgccaggactcagcagtggcctggacaacagcctcagcttcctctacccatcttcttttcttaaagcaggctatgtgccctacatggcaaggcaccatgactgcccatcgagatgccaagaagggctatggaactatgcaggtggctagtggtcagactgaagtcaccagctgaataccttaaggaggactcttgaggctcataatggagttcctggggcacagggattagttatgagcattaaagttcctaagacccagtgacagtactgggagaaaccaaggctgaagagtcaggttgaagcacaggcttttgttttttgttgtttttgttttttgagacagagtctcattctgtcacccaggctggagtgcagtggcgcaatcttggctcactgcaacctccgactcccaggttcaagcaattctcctgcctcggcctcctttagtaggtgggattacaggtgcataccaccacacctttctaatttttgcatttttagtagagatggggtttcaccatgttggtcaggctggtctcaacctcctgacctcaagtgatctgcccgcctcagcctcccaaagtgctgggatgataggcgtgagccaccacacccggccaagcacaggcttttgaatggtctccctctccccagcccaggtacatgaggccaaggtgaactgtgcatcctgagaccttgtgtccctgagtctcctttctgagtgcaagctgcactgtgagctggctgtgggatactcacacattcccacattctcctttctgccacatctcgcccttctggacctgcactgggagaaattcaggacaggagtgaactcaaggccatgaactcactggatttccatttttaggcacccatagggatgtttttaggatgtaagtttctgaggagaaagctagctctagcatgaagcttttttggattggcttctccatcgtgttggggtaacattttttttccaattttttttttcccaaaacatcgtctcagctcatttatcaagtaggtaaaatgagccttttgtgtacacacagaggcacatgtgcatgcacacacaacttgtgaacacacatttctgttaaagaagttagaaaatgagagatgggttggggcttgaagtgcatcagaggtatgaatgttgtaaaactgtcaggagatgtaaaattcctttctgaagtgtctcttctgtgaaagggttcagagcagattttgcttactatgtagtgttgcccttaagtacagtggtgtaattttattcaagattgtgctcttctatcaaaagcctctggaaataaatgttccgggatcatgttagtgtactctttatctttggggaaagggaggagggagagggactcattattgttactatgattttgaggagtgtactttaaaccctcccccattaaactatgggatttattgtaaaaaaaaaaaaaaaaaa

SEQ ID NO: 2502 - DNA, 5416 bp, Homo sapiens
agtgggccgccatgttgtcggagtgaaaggtaagggggagcgagagcgccagagagagaagatcggggggctgaaatccatcttcatcctaccgctccgcccgtgttggtggaatgagcgttgcatgtgtcttgaagagaaaagcagtgctttggcaggactctttcagcccccacctgaaacatcaccctcaagaaccagctaatcccaacatgcctgttgttttgacatctggaacagggtcgcaagcgcagccacaaccagctgcaaatcaggctcttgcagctgggactcactccagccctgtcccaggatctataggagttgcaggccgttcccaggacgacgctatggtggactacttctttcagaggcagcatggtgagcagcttgggggaggaggaagtggaggaggcggctataataatagcaaacatcgatggcctactggggataacattcatgcagaacatcaggtgcgttccatggatgaactgaatcatgattttcaagcacttgctctggagggaagagcgatgggagagcagctcttgccaggtaaaaagttttgggaaacagatgaatccagcaaagatggaccaaaaggaatattcctgggtgatcaatggcgagacagtgcctggggaacatcagatcattcagtttcccagccaatcatggtgcagagaagacctggtcagagtttccatgtgaacagtgaggtcaattctgtactgtccccacgatcggagagtgggggactaggcgttagcatggtggagtatgtgttgagctcatccccgggcgattcctgtctaagaaaaggaggatttggcccaagggatgcagacagtgatgaaaacgacaaaggtgaaaagaagaacaagggtacgtttgatggagataagctaggagatttgaaggaggagggtgatgtgatggacaagaccaatggtttaccagtgcagaatgggattgatgcagacgtcaaagattttagccgtacccctggtaattgccagaactctgctaatgaagtggatcttctgggtccaaaccagaatggttctgagggcttagcccagctgaccagcaccaatggtgccaagcctgtggaggatttctccaacatggagtcccagagtgtccccttggaccccatggaacatgtgggcatggagcctcttcagtttgattattcaggcacgcaggtacctgtggactcagcagcagcaactgtgggactttttgactacaattctcaacaacagctgttccaaagacctaatgcgcttgctgtccagcagttgacagctgctcagcagcagcagtatgcactggcagctgctcatcagccgcacatcggtttagctcccgctgcgtttgtccccaatccatacatcatcagcgctgctcccccagggacggacccctacacagctggattggctgcagcagcgacactaggcccagctgtggtccctcaccagtattatggagttactccctggggagtctaccctgccagtcttttccagcagcaagctgccgctgccgctgcagcaactaattcagctaatcaacagaccaccccacaggctcagcaaggacagcagcaggttctccgtggaggagccagccaacgtcctttgaccccaaaccagaaccagcagggacagcaaacggatccccttgtggcagctgcagcagtgaattctgcccttgcatttggacaaggtctggcagcaggcatgccaggttatccggtgttggctcctgctgcttactatgaccaaactggtgcccttgtagtgaatgcaggcgcgagaaatggtcttggagctcctgttcgacttgtagctcctgccccagtcatcattagttcctcagctgcacaagcagctgttgcagcagccgcagcttcagcaaatggagcagctggtggtcttgctggaacaacaaatggaccatttcgccctttaggaacacagcagcctcagccccagccccagcagcagcccaataacaacctggcatccagttctttctacggcaacaactctctgaacagcaattcacagagcagctccctcttctcccagggctctgcccagcctgccaacacatccttgggattcggaagtagcagttctctcggcgccaccctgggatccgcccttggagggtttggaacagcagttgcaaactccaacactggcagtggctcccgccgtgactccctgactggcagcagtgacctttataagaggacatcgagcagcttgacccccattggacacagtttttataacggccttagcttttcctcctctcctggacccgtgggcatgcctctccctagtcagggaccaggacattcacagacaccacctccttccctctcttcacatggatcctcttcaagcttaaacctgggaggactcacgaatggcagtggaagatacatctctgctgctccaggcgctgaagccaagtaccgcagtgcaagcagcgcctccagcctcttcagcccgagcagcactcttttctcttcctctcgtttgcgatatggaatgtctgatgtcatgccttctggcaggagcaggcttttggaagattttcgaaacaaccggtaccccaatttacaactgcgggagattgctggacatataatggaattttcccaagaccagcatgggtccagattcattcagctgaaactggagcgtgccacaccagctgagcgccagcttgtcttcaatgaaatcctccaggctgcctaccaactcatggtggatgtgtttggtaattacgtcattcagaagttctttgaatttggcagtcttgaacagaagctggctttggcagaacggattcgaggccacgtcctgtcattggcactacagatgtatggctgccgtgttatccagaaagctcttgagtttattccttcagaccagcaggtaattaatgagatggttcgggaactagatggccatgtcttgaagtgtgtgaaagatcagaatggcaatcacgtggttcagaaatgcattgaatgtgtacagccccagtctttgcaatttatcatcgatgcgtttaagggacaggtatttgccttatccacacatccttatggctgccgagtgattcagagaatcctggagcactgtctccctgaccagacactccctattttagaggagcttcaccagcacacagagcagcttgtacaggatcaatatggaaattatgtaatccaacatgtactggagcacggtcgtcctgaggataaaagcaaaattgtagcagaaatccgaggcaatgtacttgtattgagtcagcacaaatttgcaagcaatgttgtggagaagtgtgttactcacgcctcacgtacggagcgcgctgtgctcatcgatgaggtgtgcaccatgaacgacggtccccacagtgccttatacaccatgatgaaggaccagtatgccaactacgtggtccagaagatgattgacgtggcggagccaggccagcggaagatcgtcatgcataagatccggccccacatcgcaactcttcgtaagtacacctatggcaagcacattctggccaagctggagaagtactacatgaagaacggtgttgacttagggcccatctgtggcccccctaatggtatcatctgaggcagtgtcacccgctgttccctcattcccgctgacctcactggcccactggcaaatccaaccagcaaccagaaatgttctagtgtagagtctgagacgggcaagtggttgctccaggattactccctcctccaaaaaaggaatcaaatccacgagtggaaaagcctttgtaaatttaattttattacacataacatgtactattttttttaattgactaattgccctgctgttttactggtgtataggatacttgtacataggtaaccaatgtacatgggaggccacatattttgttcactgttgtatctatatttcacatgtggaaactttcagggtggttggtttaacaaaaaaaaaaagctttaaaaaaaaaagaaaaaaaggaaaaggtttttagctcatttgcctggccggcaagttttgcaaatagctcttccccacctcctcattttagtaaaaaacaaacaaaaacaaaaaaacctgagaagtttgaattgtagttaaatgaccccaaactggcatttaacactgtttataaaaaatatatatatatatatatatatatataatgaaaaaggtttcagagttgctaaagcttcagtttgtgacattaagtttatgaaattctaaaaaatgccttttttggagactatattatgctgaagaaggctgttcgtgaggaggagatgcgagcacccagaacgtcttttgaggctgggcgggtgtgattgtttactgcctactggatttttttctattaacattgaaaggtaaaatctgattatttagcatgagaaaaaaaaatccaactctgcttttggtcttgcttctataaatatatagtgtatacttggtgtagactttgcatatatacaaatttgtagtattttcttgttttgatgtctaatctgtatctataatgtaccctagtagtcgaacatacttttgattgtacaattgtacatttgtatacctgtaatgtaaatgtggagaagtttgaatcaacataaacacgttttttggtaagaaaagagaattagccagccctgtgcattcagtgtatattctcaccttttatggtcgtagcatatagtgttgtatattgtaaattgtaatttcaaccagaagtaaatttttttcttttgaaggaataaatgttctttatacagcctagttaatgtttaaaaagaaaaaaatagcttggttttatttgtcatctagtctcaagtatagcgagattctttctaaatgttattcaagattgagttctcactagtgtttttttaatcctaaaaaagtaatgttttgattttgtgacagtcaaaaggacgtgcaaaagtctagccttgcccgagctttccttacaatcagagcccctctcaccttgtaaagtgtgaatcgcccttcccttttgtacagaagatgaactgtattttgcattttgtctacttgtaagtgaatgtaacatactgtcaattttccttgtttgaatatagaattgtaacactacacggtgtacatttccagagccttgtgtatatttccaatgaacttttttgcaagcacacttgtaaccatatgtgtataattaacaaacctgtgtatgcttatgcctgggcaactattttttgtaactcttgtgtagattgtctctaaacaatgtgtgatctttattttgaaaaatacagaactttggaatctgaaaaaaaaaaaaaaaaaaaaaaaaaaaaaaa

SEQ ID NO: 2503 - DNA, 3913 bp, Homo sapiens; identical to SEQ ID NO: 268

SEQ ID NO: 2504 - DNA, 602 bp, Homo sapiens
cttcccagccctgtgccccaaagcacctggagcatatagccttgcagaacttctacttgcctgcctccctgcctctggccatggcctgccggtgcctcagcttccttctgatggggaccttcctgtcagtttcccagacagtcctggcccagctggatgcactgctggtcttcccaggccaagtggctcaactctcctgcacgctcagcccccagcacgtcaccatcagggactacggtgtgtcctggtaccagcagcgggcaggcagtgcccctcgatatctcctctactaccgctcggaggaggatcaccaccggcctgctgacatccccgatcgattctcggcagccaaggatgaggcccacaatgcctgtgtcctcaccattagtcccgtgcagcctgaagacgacgcggattactactgctctgttggctacggctttagtccctaggggtggggtgtgagatgggtgcctcccctctgcctcccatttctgcccctgaccttgggtcccttttaaactttctctgagccttgcttcccctctgtaaaatgggttaataatattcaacatgtcaacaacaaaaaaaaaaaaaaaaaa

SEQ ID NO: 2505 - DNA, 9894 bp, Homo sapiens; identical to SEQ ID NO: 1583

SEQ ID NO: 2506 - DNA, 417 bp, Homo sapiens
ttttaagaacaaattttttcagattatctggggctaacagtactgaccaggggagtaattttctgtatattgaatgactttttttttttttttaagtgaaatcaaccaattgttttgaagttctatggaaactcagtgccacctctctttagttcaggtatcctgggttagttctttaattgagatctacaacaacactgagtggaaaatgattttggtttctgggaaccaacctgttcaggagatgattaactattatactgctatttggggattaaaatagatttttaaaaaatttgagctcccaaaatattttatgcattgggcaatagctgaaaactttcttcagctgatcgttataatactgtttagtggagagtcaactgactgataatctattacttagggatggatttt

SEQ ID NO: 2507 - DNA, 12317 bp, Homo sapiens; identical to SEQ ID NO: 2183

SEQ ID NO: 2508 - DNA, 389 bp, Homo sapiens
agtccctttgggaaccaggtgctaacaagaagctgttatgtgtgggatttcggagccttactttaacgatagaggaaccaagtatcattttagatatcttttatttatgttctcggtgcatatgttgactttaatccctcttcccccacacctcgcccattaaggggaaggaggttaactctgcagatgatattcaggcccaaccagctcactctctggggtggctactgactaaaggcagagaatgtccatccaacatgcccttctgactatacagtcaccacttttttgggggaattctttagcagatcttattgttctttctgcagaagctatcattcctacctccccaacccccaaaatctctaatacaggccaagtcatttttt

SEQ ID NO: 2509 - DNA, 379 bp, Homo sapiens
atggctcctgtgaagaagggtggcaagaagaaaaagggccgttctgccatcaatgaggtggtgacccgagaatacaccatcaacattcacaagtgcatccatggagtgggcttcaagaagcatgccccttgagcactcaaagagattcggaaatttgtcaggaaggagatgggaactctagatgtgcacaactgataccaggctcaacaaggctgtctgggccaaaggaataaggaatgtcccatgccgaatccatgtgcagttgtccagagaatataatgaggatgaagattcaccaaataagctctgtacttcggttacctatgtacctgttaccactttcaaaaatctatagacagtcattgtggatgagaactaa

SEQ ID NO: 2510 - DNA, 3683 bp, Homo sapiens; identical to SEQ ID NO: 476

SEQ ID NO: 2511 - DNA, 2567 bp, Homo sapiens; identical to SEQ ID NO: 2053

SEQ ID NO: 2512 - DNA, 1570 bp, Homo sapiens
gcacgcgggggcggggccgcgcctgcgcagaccgcctgttatggcggccgcctaagtcccacagagacgggagtcgggtgggatcccaggctgggccccgcggcggctggattctcttccctggccaagtctctgagatcttctcccagggcgatgcaaagctactcgctaccagcttggacctgtctgcagtatctcctctgggacctgccatgctgaggacccattctcacctctgagggactcctgtcctaggactaaggtggagcctgggccatggtacagctggctcctgcggcagccatggacgaggtcacctttaggagcgacactgtgctgtcagatgtccacctctataccccgaaccatagacatctcatggtacggctgaacagcgtggggcagccagttttcctgtcccaattcaagcttctatggagccaagactcttggacagattcaggagccaagggtggcagtcacagagatgttcacacaaaggagcctccttctgctgagacaggcagcacagggtcccctccaggaagtggccatggtaatgagggtttctccctccaggccgggactgacaccactggccaggaagtggctgaagctcagctggatgaggatggggatttggacgtggtgagaagaccacgagccgcctctgattccaacccagcagggcctctgagagacaaggtacatcccatgattctagcacaggaagaagacgacgtcctgggagaggaagcacaaggcagcccgcacgatatcatcagaatagagcacaccatggccacgcccctggaggatgttggcaagcaggtgtggcggggcgccctgctcctggcagactacatcctgttccgacaggacctcttccgaggatgtacagcgctggagctcggggccggcacggggctcgctagcatcatcgcagccaccatggcacggaccgtttattgtacagatgtcggtgcagatctcttgtccatgtgccagcgaaacattgccctcaacagccacctggctgccactggaggtggtatagttagggtcaaagaactggactggctgaaggacgacctctgcacagatcccaaggtccccttcagttggtcacaagaggaaatttctgacttgtacgatcacaccaccatcctgtttgcagccgaagtgttttacgacgacgacttgactgatgctgtgtttaaaacgctctcccgactcgcccacagattgaaaaatgcctgcacagccatactgtcggtggagaagaggctcaacttcacattgagacacttggacgtcacatgtgaagcctacgatcacttccgctcctgcctgcacgcgctggagcagctcgcagatggcaagctgcgcttcgtggtggagcccgtggaggcctccttcccacagctcctggtttacgagcgcctccagcaactggagctctggaagatcatcgcagaaccagtaacatgacccatcgcctccacaaggcgcggcgtctcgactgttcttagagtgtatttctagtaaaatcagaagctcaccaaagcaa

SEQ ID NO: 2513 - DNA, 3372 bp, Homo sapiens
gggagcagtgcccgagcgcggtttctcttaaggttctgcagggcaaggctgtctgggacaggcttggccatggatccgctctcagagctgcaggatgatctgaccttggatgacaccagcgaggctctgaaccagctgaagctggcctccatcgatgagaagaactggccctcggatgaaatgcctgacttccccaagtcagatgactccaaaagcagctccccggaacttgtcacacacctgaagtgggatgacccatactatgacatcgcccggcaccagatcgtggaggtggcaggagatgacaagtatgggcggaagatcattgtgtttagtgcctgtcgaatgccccccagccaccagctcgaccacagcaagctcctggggtacctgaagcacaccctggaccagtacgtggagagtgactacacacttctgtatctgcaccacggcctgaccagcgacaacaagccctccctcagctggctccgtgatgcctaccgggagtttgaccgcaagtacaagaagaacatcaaggccttgtacatcgtgcatccaaccatgttcatcaaaactctgctcatcctcttcaagcccctcatcagcttcaagttcgggcagaagatcttctatgtgaattacctgagcgagctgagcgagcacgtgaagctggagcagctggggatccctcgccaagtgctcaaatatgacgacttcctgaaatccacacagaagagccccgcgacagcccccaagcccatgcccccacggccccccctgcccaaccagcagtttggagtctcgctgcagcacctccaggagaagaatccagagcaggagcccattcccattgtactcagggagactgttgcctacttacaggcccacgctctcaccaccgagggcatcttccggaggtcggccaacacccaagtggtccgggaagtgcagcagaagtacaacatggggctgcctgtggatttcgaccagtacaatgagctgcacctgccagcagtcatcctcaagaccttcctccgggagcttcctgagcccctgctcacctttgacctctacccccatgtggtgggcttcctcaacattgatgaaagccagagggtgccagcgacactgcaggtcctccagacgctgcccgaggagaactaccaggtgcttcgtttcctgactgctttcctggtgcagatttctgcacacagtgaccagaacaagatgaccaacactaacctggctgttgttttcggccctaacctgctgtgggccaaggatgcggccatcaccctcaaggccattaatcccatcaacaccttcaccaagttccttctggatcaccaaggggagctgttcccaagcccggaccccagcgggctctgaacctggcccctgccccaccagccccttctctggtagcccgggtttggactcttcctcctggcatcaggggccatgaagccccctggagagagatgttggagccacccatcaggcatgctctcccccacctctgtccagcccgcctcacggccctggcggcctcgctgttaccagaagacgtttttctctgccttacacttctcactgcctctctggacaccgggcttttgctgggctctccagagctgggcttggctcttccagctggagaaggactgagccccagtaacccctttcctgctttttcctgcctctgtttccctagcaagtgtggatgaatcaaatgactgccggctgggctggtagcaggggccagtcctcccctcttgattgctgggaatgagcagctgagctctttggtgtggacaccgccccaagctgaggtgcctccctatctggtaggctgccctgctttgcagaagccccactgcatgaaggcctgagtgcaagcacccttgctcctgtactgcccccagcagcgcagtctggggtatttcccctgctgaggagtgacagggctggagactgtgtctgctttctgcctcctcttccacacatcctgggtcagcctttcccaagtgatactgcccctggggtgtcctaaccccttggttgtgcagggactggtagcttggatgacatggctcagagtcccagcatccacttgaaacctccctctccacctccccgcccccgagagctacagcgtgtgatggaatcagtgaccggccaggttagcctctcccctcttggcctcctttcccacacgggcagatcatcagccttcatgttcttgtggacctgtctgttacggagtcacactggcccctgccccagccagaggtgactcagtgcctcaggatcttatggctccttcctccagctgggggactcttaaaggggctggggtagagactaagagtgcccgtaggaggggcagagattgtgctgataggtcagtccagataggtgggttctagcaatttccccaggggattaaggggctctagggccacctttttttttttttttctgagatggagtctcgctctgtcaccaggctggagtgcagtggcgcgatctcggcacacctccgccttctgggttcaagcaattctcctgcctcagcctcctgagtagctgggactataggtgcatgccaccatgcccagctaatttttgtatttttagtagagacggggtttcaccatgttggccaggatggtctcgatctcctgacctcatgatccacccacctcggcctcccaaagtgctgggattccaggcgtgagccactgcgcccggccagccctgttgtctttcaaagaacctcggccccagtgatggctgatctcactcccactgtctcgtagaattacactccttcctggggatccctcttcctgcagccttgtccttggggagtacagggaagtacctgcagtgaccctgcccccatgaccttggccaggcaggatgattccagagcccgtactgtggggatcctcactgaccagcccagccccatccgcaagccaggctgggcctgggcataacttcgctgggctctcccaagaccatcagcagtgcatccagccccctggggcctgggctgctgctggttcttcatcagtcccttggtctctagcctcggccagggctgctctgctctccgccctcctttgtgtatcaagtgtcgctcacagccccattcactggggagcctttcggatctatttggtctttctcatgtcccccactggtctgtaccccagggagcgggtgcttgtactgtgtgaatccagtgttcacattcacacttaatgacttccttggcaccaatcatgtatttcaccgtttgcactttttgtatttcaataaaaatgttgatgcaaaaaaaaaaaaaaaaaaaaaaaaaaaaaa

SEQ ID NO: 2514 - DNA, 2530 bp, Homo sapiens
gggaatatgagtgatggtgcctcaaagcagtaactttttgcttagagcttgagagtcaaagttaaggacccacatgtatacttcggctctagcgagtctaaggatgataatatggatacaaaatctattctagaagaacttcttctcaaaagatcacagcaaaagaagaaaatgtcaccaaataattacaaagaacggctttttgttttgaccaaaacaaacctttcctactatgaatatgacaaaatgaaaaggggcagcagaaaaggatccattgaaattaagaaaatcagatgtgtggagaaagtaaatctcgaggagcagacgcctgtagagagacagtacccatttcagattgtctataaagatgggcttctctatgtctatgcatcaaatgaagagagccgaagtcagtggttgaaagcattacaaaaagagataaggggtaacccccacctgctggtcaagtaccatagtgggttcttcgtggacgggaagttcctgtgttgccagcagagctgtaaagcagccccaggatgtaccctctgggaagcatatgctaatctgcatactgcagtcaatgaagagaaacacagagttcccaccttcccagacagagtgctgaagatacctcgggcagttcctgttctcaaaatggatgcaccatcttcaagtaccactctagcccaatatgacaacgaatcaaagaaaaactatggctcccagccaccatcttcaagtaccagtctagcgcaatatgacagcaactcaaagaaaatctatggctcccagccaaacttcaacatgcagtatattccaagggaagacttccctgactggtggcaagtaagaaaactgaaaagtagcagcagcagtgaagatgttgcaagcagtaaccaaaaagaaagaaatgtgaatcacaccacctcaaagatttcatgggaattccctgagtcaagttcatctgaagaagaggaaaacctggatgattatgactggtttgctggtaacatctccagatcacaatctgaacagttactcagacaaaagggaaaagaaggagcatttatggttagaaattcgagccaagtgggaatgtacacagtgtccttatttagtaaggctgtgaatgataaaaaaggaactgtcaaacattaccacgtgcatacaaatgctgagaacaaattatacctggcagaaaactactgttttgattccattccaaagcttattcattatcatcaacacaattcagcaggcatgatcacacggctccgccaccctgtgtcaacaaaggccaacaaggtccccgactctgtgtccctgggaaatggaatctgggaactgaaaagagaagagattaccttgttgaaggagctgggaagtggccagtttggagtggtccagctgggcaagtggaaggggcagtatgatgttgctgttaagatgatcaaggagggctccatgtcagaagatgaattctttcaggaggcccagactatgatgaaactcagccatcccaagctggttaaattctatggagtgtgttcaaaggaataccccatatacatagtgactgaatatataagcaatggctgcttgctgaattacctgaggagtcacggaaaaggacttgaaccttcccagctcttagaaatgtgctacgatgtctgtgaaggcatggccttcttggagagtcaccaattcatacaccgggacttggctgctcgtaactgcttggtggacagagatctctgtgtgaaagtatctgactttggaatgacaaggtatgttcttgatgaccagtatgtcagttcagtcggaacaaagtttccagtcaagtggtcagctccagaggtgtttcattacttcaaatacagcagcaagtcagacgtatgggcatttgggatcctgatgtgggaggtgttcagcctggggaagcagccctatgacttgtatgacaactcccaggtggttctgaaggtctcccagggccacaggctttaccggccccacctggcatcggacaccatctaccagatcatgtacagctgctggcacgagcttccagaaaagcgtcccacatttcagcaactcctgtcttccattgaaccacttcgggaaaaagacaagcattgaagaagaaattaggagtgctgataagaatgaatatagatgctggccagcattttcattcattttaaggaaagtagcaaggcataatgtaatttagctagtttttaatagtgttctctgtattgtctattatttagaaatgaacaaggcaggaaacaaaagattcccttgaaatttagatcaaattagtaattttgtttatgctgctcctgatataacactttccagcctatagcagaagcacattttcagactgcaatatagagactgtgttcatgtgtaaagactgagcagaactgaaaaattacttattggatattcattcttttctttatattgtcattgtcacaacaattaaatatactaccaagtacagaaatgtggaaaaaaaaaa

SEQ ID NO: 2515 - DNA, 5656 bp, Homo sapiens
acaatgcaccgcacaatggcccgaccgccgccactaccggggcctgagggggcctggcggagcccgagcgcggcccggcccgcagcgtggggccccgagcgcggtgaagagattgttttctgaaagctgcgttggaggctgtgacagagctgagagcctgtgtggagcggatggggaggctttctcaataacatggccctttgccattagccttgccatgaccacatttttcaccagcgtccccccctggattcaagatgcaaagcaggaggaggaagtgggctggaaactagttcccaggcctcggggccgggaggcggagagtcaagtgaagtgccaatgtgaaatttcgggaacacctttctcaaatggggagaagctgaggcctcacagcctcccgcaaccagagcagagaccatatagctgccctcagctgcactgtggcaaggcttttgcttccaaatacaagctgtataggcacatggccacccactcagcccagaaaccccaccagtgtatgtactgtgataagatgtttcaccgcaaggaccatctgcggaaccatctgcagacccatgatcctaacaaagaggccctccactgctctgagtgcggtaagaattacaatacgaagctgggctaccggcgccacctggccatgcatgctgccagcagcggtgacctcagctgcaaggtgtgcctgcagacctttgagagtacccaggccctgctagagcacctgaaggcccactcacgccgggtagcaggcggtgccaaggagaagaagcacccctgtgaccactgcgaccggcggttctatactcgtaaggatgtacggcggcacctagtggtgcacacaggccgtaaggacttcctgtgccagtactgtgcccagcggtttggccgtaaggaccacctgacgcgtcatgtcaagaagagccactcgcaggagctgctcaagatcaagacagagcccgtggacatgttaggcctactcagctgcagctccacagtcagtgtgaaggaagagctgagccctgtgctgtgcatggcctctcgggacgtaatggggaccaaggccttccctggcatgttgcccatgggcatgtatggtgcccacatccctaccatgcccagcacgggcgtgccacactccctggtgcacaacacgctgcccatgggtatgagctaccctctggaatcctcacctatctcttccccagctcagctccctccaaaataccagcttggatctacctcatacttgcccgacaaattgcccaaagtggaggtggatagttttctggcggagcttcctggaagcctgtctctctcatccgctgaaccccagcccgcctcacctcagccggcggcagctgcggccctcctagatgaagcactgcttgccaagagccccgccaacctctctgaggccctctgcgctgctaatgtggacttctcccacctactgggctttcttccactcaacctgcccccgtgtaacccacctggggccacaggaggcctggtcatgggctactcccaggctgaggcacagcccctgcttaccactttgcaagctcagcctcaagattccccaggagctgggggaccactgaactttgggcctctgcactccttgcctcctgtcttcacgtctggcctgagtagcaccaccctgcctcgtttccatcaagcattccagtagcccccacagaggccctcagctcagtttttggctctgttatggagccttagtacccaccccgtctgtgtcccccatgaaggcagctgagctttcagagctgggttcaaaaaaaaaaattccagtgtctgtatacaggagcacttggtttgggggttcaggctctaggatcgattccagaaggagccttgagccccaaccccgtgaaaagatctcataccgtaggacttcaggtattatttacttttatttttttgacctgaatcgggagccacacttggccctcttcctctccaaagcgccagaacctccttctctttggagaatggggaggcctcttggagacacagagggtttcaccttggatgacctctagagaaattgcccaagaagcccaccttctggtcccaacctgcagaccccacagcagtcagttggtcaggccctgctgtagaaggtcacttggctccattgcctgcttccaaccaatgggcaggagagaaggcctttatttctcgcccacccattcctcctgtaccagcacctccgttttcagtcagtgttgtccagcaacggtaccgtttacacagtcacctcagacacaccatttcacctcccttgccaagctgttagccttagagtgattgcagtgaacactgtttacacaccgtgaatccattcccatcagtccattccagttggcaccagcctgaaccatttggtacctggtgttaactggagtcctgtttacaaggtggagtcggggcttgctgacttctcttcatttgaggtcacatttttcccccgtggggaaataaactgactttggactgcttcagtctctgccatcttccatgactgcatttgttcctgcctgcctcggcggtatccacagaagacaggcaagaggattggagcagttttctcacaggtctgcaattctgtttttctccaagtacattatgaccccctcatccttctcttgaactggagaggggaagaaatgaaaggcatgcccacgtccgtcacctccccatcccctagtccccaccttgaacatcatgagctgttgttattagtcttggaagcagagtctgggttggtgtggatagcaaaggaggaagtctgagcccctcattggtcttcctcccacctgtcccttttccgggaagttgtggaattgttggaagaagagtttgcagaaggttaggaatgggtagatagctaagtcctaatctatgggtacattgttgtgtcccaaaccaaaattttccttatccacaatgtcccttctgtctcttccactttacagtggactcggccactgtgcataggcttctctgctctccatcaaatcacttccactttcctgtgcccccacccccgcctccagttttccgctagtatccggcaaggtttcttgcaacaaatgattagttcttttcttctgactcgtggggctccctgctgcagagagcacagcccttgcctggagcccaggaaccccatccttgcttcatctcagttcttcatgggcttcactcttcccactcacggaagggaggtagctcagggacctccactgtgggacccttgagacgcttccactctgattcagaaacacacttctacctctttactgttaactcttaacagatgcagtcagcagtttctgggcacttctctcagtaggtgcctcatgctgacttctccagtagggtttcaggacaaactaccaaggaattgcctcagcctcctaccagtcctccctcacccaccttctgtctaggttcacttggtttgtcatcaggaactgagcaggtccaggactcagctttctgcttcagcctaagccagtactccttgtttgaggtaaaagccttaaaatttagctccctagctcttgattagaagcaatttggagtaagtgtgttttgatttaggcagggtagcttgggatacctttttaaaaacaccagatattaaaatgtctggcaaggttagaatcagactagatgatttgcttctaaaaattagtttcagtgagtcccagggactaattaaggtttattttaaaaagtgtctaccttggtacgcagccacctcctgcatgctgtgcatgttattgggacttgtattataggtgatggtatgtgagaatccagttgggactcgctgttgccatcctctttgttgtatctggttttcatcactagactcagcaacccttctcaccttaactgccaccttccctacactctcagtttacagaggccactgggcctctggctgcagaatacaaagtcccgggctgttagaggagtcctttcctctctgcctgccctttcctgtccctccctcgaattctctctccccgtaagtgatgctggaaaagtcataggactggcaaagcaactgtttaaaccctttgtaaccggggccttgcccccacctcctgtcttttctccttgccttccccactcctgtgtcctcccatctatcctgtctttcctttcctcctctcagtgtcctcagcacccacaaggaattttcctatcactgtgaactttgctggtacagaggaataatatctgccttcacctttttttttttggaccatagctagccagtcatttcttaaacctcccttcctaaaatctggggggtcggggggaaagaaaaaaaaagccttagtggcctggttgttcaaaggataagaatagctttatcctgcactcagtacccgaactcacttcagtatgcttactgaggccatgagaacctgaggggcatctgcccaggacaggagccatggcatatgacaaagaccaatgagggaccaggaaaaaaagtgatgtcccctttccctgccacctccagcctctgccagcaatgagctgtccccctcccaccctacacagtagctggtcagggctgagtacagtcctgggggtaaggggatgacatgcccaggtgtcagctcaaaggatctctgcatcatcttgaggtgggaggcagggaaaggagcgccaatgaggttccctgcaacccccgccctccagcccaccgcccaaccttttacaaatggcattttcttaattgaaaatccgggaagcaggtgtgattacttttttgctcgtagatattgtcctaagttggaattctcccactgccctaaaactttccctagtagtcctttaaactcccccctccctttttggtagctgttttctccgtcctctctccacctgccctcttatctaggagctgtttgtaagcacgatttttttaacaggttatattgtacaggatcaatattttgctttttaacaaggatatttatgtaataagaaactttgccttaggcaggtgttggccagaaaagtccagattcctctgggatcccaccctggcctctcctggaactctgaacctgctgtggaaggaattggccatgaccttcacctctggagagtagggtctatggcgagggaaaagggtgttcaccatgataacctagtgcctccatagaggggtttggaaaaattccagtccgatttctttgtgtgtcagctgacttccttagctgattgttcccacttgcacctctccacctttggcactagaactcctgagacaccacttctcatgcttctccctccctaccagcggtcaaggctttggagccactcttttgtaactccagattatttaaagagaaaagtacaagacagaaatcttctagcactttgtaaacacagtgaataacctcttggagtatttttggctttatataaaacaaggtttttaattgtaaagtataagtgccattagaaaatgcacagggcatatctttgttaaagtagatttttcaatgttttacagaattacattttcaaaaaaaggtttttataatgaagttgtttattaaaaacttctgaatgatgtgtt

SEQ ID NO: 2516 - DNA, 1524 bp, Homo sapiens; identical to SEQ ID NO: 1486

SEQ ID NO: 2517 - DNA, 1336 bp, Homo sapiens
atagagtagcggaagtggtccgttctcttcctctcccggcccaagcttctgggtatttctattgcgcgaggcattgtgggttgctgggcggcccggtctcggagaagaggggagagtggcgggccgctgaataagcttccaaaatgatggattctcagctggtagctggtgttgcattcaagaagactttctcttacgctgggtttgaaatgcaacccaaaaagtaccacaatcccaagattgcccttttgaatgtcgagctcgagttgaaagctgagaaagacaatgctgagataagagtccacacagttgaggattatcaggcaattgttgatgctgagtggaacattctctatgacaagttagagaagatccatcattctggagccaaagttgtcttgtccaaactccccattggggatgtggccacccagtactttgctgacagggacatgttctgtgctggccgagtacctgaggaggatctgaagaggacaatgatggcctgtggaggctcaatccagaccagtgtgaatgctctgtcagcagatgtgctgggtcgatgccaggtgtttgaagagacccagattggaggcgagaggtacaatttttttactggctgccccaaggccaagacatgcaccttcattctccgtggcggcgccgagcagtttatggaggagacagagcggtccctgcatgatgccatcatgatcgtcaggagggccatcaagaatgattcagtggtggctggtggcggggccattgagatggaactctccaagtacctgcgggattactcaaggactattccaggaaaacagcagctgttgattggggcatatgccaaggccttggagattatcccacgccagctgtgtgacaatgctggctttgatgccacaaacattctcaacaagctgcgggctcggcatgcccaggggggtacatggtatggagtagacatcaacaacgaggacattgctgacaactttgaagctttcgtgtgggagccagctatggtgcggatcaatgcgctgacagcagcctctgaggctgcgtgcctgatcgtgtctgtagatgaaaccatcaagaacccccgctcgactgtggatgctcccacagcagcaggccggggccgtggtcgtggccgcccccactgagaggcaccccacccatcacatggctggctggctgctgggtgcacttaccctccttggcttggttacttcattttacaaggaaggggtagtaattggcccactctcttcttactggaggctatttaaataaaatgtaagacttcagataactttgtaaattaaaaaaaaaaaaa

SEQ ID NO: 2518 - DNA, 2967 bp, Homo sapiens; identical to SEQ ID NO: 2399

SEQ ID NO: 2519 - DNA, 1920 bp, Homo sapiens
tgggtaagatggctacatttaaggtgactctgaatggtggggttctagcttggtcactttcatttcttgccatcataaaaactagtaggctgtggagtgcgcttcctgtttgtgtcatctggtcgtagaaccttttccaaacagaagcatctgcctttggctgttctgtgacctttgaagccagtctcagtggtttaggcagctttgcagttctaactctagctagaggccaggctgtgtgcagagctaaagcacaaatgagcagtacatcagcatgggcagagaaaatacaggactccagatgggaaggttttaagagtcacactggcatggaaggcttatctgccattctatttatagcctgaaatgattctggcctaccctgtcctgtctgtatgatctaaaaaccagccttttccccagaaggctctgagcacatccagaagtgataacctgaccctccacaccaaagacaccctggtgctgctgctggtgagactggtgtccaaggcagggcccagcagaaactgcagcctgctgtctaccaaaggaggtacccgagttgggtactttaaaaaaaaaaaaaacctgcccttacccctctccctaatgggattttttttacctgttcctgggcccattacagagcctctgaagtttgcagtatgctttcaaatgaaataatatacttccattgattcaggaagcagattttttgagtgcctatatgtgagacagtgtgctggttgaaggcctgatgctgttattccaggagactgcaggcccttgatgccaggactctctctactaaggccagttcaggtctgggaaagggagctggcctattgcccaccacctgttgtcagtaggttaggagctgttgactcaggatgaggaagtatggtctttaaaaaaaacaaaatatattttagatttctcccctaaagttagttagagaaaaaggtctattcttcagcagatcactgtggcccctcttggagctgggtgttttcaaattttcttgaaaagtgagttgtgtcacagaatgtggatagtgagatttgcttctgggcctgtggttggacgcccacagcttcctttggaggggcaagaagttggcctctcggttgacattccagagaaatggccagacttgcccctacccttttgcccctggtgtagctgcctcacatgaggttattgcaagagttccccttgcaataccctttgtgccctcaagaattaaaagcctctatgatccagagttgctatgcaccaaattttgatgccttctaaataccttgatgcctgtagcactagaaatgctttcctatttaaaataaacattaaattttaaaatagagctttgtatactatgtaagcagttttatatcagctttgtaaaagctttggtgttaagagtcaatattttttggctttgtagataaagacttaaatttttgtgcaacatagtggtgttaaagcacacatccattggactatgcaaatcaatttctactagcagcactgagcaactgggcacgtgctagtacgcaccccctcctactctaactgtgctagctcttgggttgaggaatggaatgggtagccttctgcttactggagatgcacagagaaacatggctgaaaacagctttaaaaagaacatgtctttgggttcatgtgtggtgctgctgcccgggtgtaaactatccccacccagggccagccattatcaccagacctcttctgggcctggctgtgaagccctgtttttggtattcagaatggatctttaaggctcagatgggctcaaattgaaaccttgtgttttataaaatggatgtttagtaaaggaactggttctcagttatgtttacagcacttggaattgtgtgttcttgtacattttgtatttta

SEQ ID NO: 2520 - DNA, 7740 bp, Homo sapiens
cgtgcgtgtcttgtctccctgtccacgtgtgagctgtgagtgtgtgtgagtcagagttcgggtgtctgtgggtctctgagcctctgctggcagcacccggggctcgccaagctcttgccggctggcgcgcgcccagcccctggcgggacttgtccgtgtgtctgtccgcgcgcggggcctggagaagcacgctgcagtcctgtccgcctcccgctcgctgcctcgctggctgtcgctcgctcgctctgcctctccgcccgggctctgccgaagggggcggggtgggggtgcagggcggggggaggggaggctcctgcattcttgcggtcggggaggaatccgagccagcgttactggtctccagaagagcccagctgcagccccggggccccgccaggcctctcgctgcccgcccgggcctgctgggatgggcacgggctaggcctcgagctggggacggggcggggcgtggccccaaccccgggccccctccacggctggagcgctctgggggtggggcacgaggggtaccccaccctgggtgaggggcgcgtctgggagcaggaatccctcagggggccaggggagacctcacagccgccccacacggcacctttgctacctagccttttagtgaattctgtctctgccgcccgtcggggcggaggcttgctggagactgcaagccccctgagggcaaggtgcgggagggatggggacagggctggcctccaggatcgagaccccatctcgtaatcctctttttccagtgccaccccaccctatccagctccctagtcccagggctgttgggtcctcccttctcccctccccctctgacaccccctccccaagtcacgagttttctctttggggcttgttgctgcagtccgtgctccagtaccgagtacctggctgggccctgggcacgcacaggggccgtagccccactgtgtgtgggagccatgaggatcctggctaacaagacaaggttaccccaccccaggaggagagaagctccagggagcccgccgctgtccccccgcggtcattgcccccctgccccagccaagccaatgcacccagaaaataaattgaccaatcatggcaagacagggaatggcggggcccaatctcagcaccagaatgtgaaccaaggacccacctgcaacgtgggctcgaagggcgtgggggcggggaaccatggggccaaggccaaccagatctcgcctagcaactcaagtctgaagaacccccaggcaggggtgccccctttcagctcgctcaagggcaaggtgaagagggaccggagtgtgtctgtggactctggagagcagcgagaggctgggaccccatccctggattcagaggccaaagaggtggcgccgcggagtaagcggcgctgtgtgctggagcggaagcagccgtacagtggggacgaatggtgctctggaccggacagtgaggaggacgacaagcccattggggccacccacaattgtaatgtagcagacccagccatggcggccccacagctgggtcccggccaaaccacccaactgcccctcagcgagagcagcgtgccaggcgccccgcacggccctcctcctggccttcggcctgatgcccctgggggcgggggcgggggcgggggcgtccccggaaagcctccctcgcagttcgtatatgtcttcaccacccacctggccaacacggctgcagaggcagtgctgcagggccgggccgactccatcctcgcctaccaccagcagaacgtgccccgggccaagcttgaccaggcccctaaagtgccccccaccccagaaccgctacccctgagcacgccgtcagcaggcaccccgcagtcccagccacctccactgccgccgccgccacccccggcccctggcagtgccccgcctgctctgcccccagaggggcctcctgaggacagcagtcaggacctggcccccaactcggtgggagctgccagcacaggtggtgggactgggggcacccaccctaacaccccgacggctaccaccgccaacaaccctctgcctcctggaggagaccccagcagtgcccccggccctgccctgctgggggaggcagccgcccctggaaatgggcagcgcagcctggtgggctcagagggcttgtccaaagagcagctggagcatcgggaacggtccctccagacgctgcgagacattgagcgactgctgctccgcagcggagagactgagcccttcctcaaggggcccccaggaggagcgggtgaggggggcccaccagcacaagccccccctcccccccagcagccacccacggcccctcccagcgggctgaagaaatatgaggaacccttgcagtccatgatttcacagacacagagcctagggggccccccgctggagcatgaagtgcctgggcaccccccgggtggggacatggggcagcagatgaacatgatgatacagaggctgggccaggacagcctcacgcctgagcaggtggcctggcgcaagctgcaggaggagtactacgaagagaaacggcggaaagaggaacagattgggctgcatgggagccgtcctctgcaggacatgatgggcatggggggcatgatggtgagggggcccccgcctccttaccacagcaagcctggggatcagtggccacctggaatgggtgcgcagctgcgggggcccatggatgttcaagatcccatgcagctccggggcggacctccctttcctgggccccgtttcccaggcaaccagatacaacgggtacctgggtttgggggcatgcagagtatgcccatggaggtgcccatgaatgccatgcagaggcccgtgagaccaggcatgggctggaccgaagacttgccccctatggggggacccagcaattttgcccagaacaccatgccctacccaggtgggcagggtgaggcggagcgattcatgactccccgggtccgtgaggagctgctgcggcaccagctgctggagaagcggtcgatgggcatgcagcgccccctgggcatggcaggcagtggcatgggacagagcatggagatggagcggatgatgcaggcgcaccgacagatggatcctgccatgtttcccgggcagatggctggtggtgagggcctggcgggcactcccatgggcatggagtttggtggaggccggggcctcctgagccctcccatggggcagtctgggctgagggaggtggacccacccatggggccaggcaacctcaacatgaacatgaatgtcaacatgaacatgaacatgaacctgaacgtgcagatgaccccgcagcagcagatgctgatgtcgcagaagatgcggggccctggggacttgatggggccccagggcctcagtcctgaggagatggcccgggttcgggcccagaacagcagtggcgtgatgggcggcccgcagaagatgctgatgccttcacagtttcccaaccagggccagcagggattctctggaggccagggaccctaccaagccatgtcccaggacatgggcaatacccaagacatgttcagccctgatcagagctcaatgcccatgagcaacgtgggcaccacccggctcagccacatgcctctgccccctgcgtccaatcctcctgggaccgtgcattcagccccaaaccgggggctaggcaggcggccttcggacctcaccatcagtattaatcagatgggctcaccgggcatggggcacttgaagtcgcccacccttagccaggtgcactcacccctggtcacctcgccctctgccaacctcaagtcaccccagactccctcacagatggtgcccttgccttctgccaacccgccaggacctctcaagtcgccccaggtcctcggctcctccctcagtgtccgttcacccactggctcgcccagcaggctcaagtctccttccatggcggtgccttctccaggctgggttgcctcacctaagacggccatgcccagcccgggggtctcccagaacaagcagccgcctctcaacatgaactcttccaccaccctgagcaacatggaacagggtaccctcccgcctagcggcccccggagcagctcctcagcacctcccgccaaccctcccagcggcctcatgaaccccagcctaccattcacttcctccccagaccccacaccttcccagaaccccctgtcactgatgatgacccagatgtccaagtacgccatgcccagctccaccccgctctaccacaatgccatcaagaccatcgccacctcagacgacgagctgctgcccgaccggcccctgctgccccccccaccaccaccgcagggctccgggccagggatcagcaacagccagcccagccagatgcacctgaactcagccgctgcccagagccctatgggcatgaacctgccaggccagcagcccctgtcccatgagcccccgcccgccatgctgccctcccccacccctctgggctccaacattccactgcatcccaacgcacaggggacaggggggccccctcaaaactccatgatgatggccccagggggccccgactccctgaatgccccctgtggcccagtgcccagctcctcccagatgatgcccttcccccctcggctgcagcagccccatggtgccatggcccccactgggggtgggggcggggggcctggcctgcagcagcactacccgtcaggcatggccctgcctcccgaggacctgcccaaccagccgccaggccccatgcctccccagcagcacctgatgggcaaagccatggctgggcgcatgggcgacgcatacccaccgggtgtgctccctggggtggcatcagtgctgaacgaccccgagctgagcgaggtgatccggcccaccccaacggggatccccgagttcgacttgtcgaggatcatcccctctgagaagccaagcagcaccctccagtacttccccaagagcgagaaccagccccccaaggctcagccccctaatctgcatctcatgaacctgcagaacatgatggcggagcagactccctctcggcctcccaacctcccaggccagcagggcgtccagcgggggctcaacatgtccatgtgccaccctggacagatgtccttgctgggcaggacaggcgtgcccccacagcaggggatggtgccccatggcctgcaccagggggtcatgtcccctccacaaggcctcatgacccagcagaatttcatgctgatgaagcagcggggcgtggggggcgaggtctacagccagccgccccacatgctctccccgcagggctccctcatgggccccccgccccagcagaacctcatggtgtcccacccccttcggcagcgcagtgtgtccctggacagccagatgggctacctcccggcaccaggcggcatggccaacctgcccttctagaagtcgctgccagggctggagccggggcaatgttgcaaatacgataaccttaacaaagttcttcccctcaatgttgggatggcctgggtcgcggggtggggtggagggggtgggagggggcttgtgtagggagtggcatttgtggaaaccagatgtgctggcagcttagggggaagtggcagtgtggggtgggggattttgcattggggttggttccatttcggccaccaggactgcccctcccccactcctcccaattcctatggagcctctctattttacctctttccgtgcatccctgcacccgccacacccccttcagctatgcttttggagtcctggatgggaatctggggggagagaggaaggacaggtcaggtctcccccagccccttctgctcctgtctcctcgtgtccgcattgctggagctccacctccctcttggtttctccgcacccgcccattttccttctgtctttacctgcttcgtatcctttccctgctgatgtggctgacccctctcccacccctccctgcaggcggctggccaggtgggcaggtgccagccggagctgtaaatagagcgctgcgcttttgtgctggtttgtgcgtgtgctgtatttctgtgttttgatagaagtcacacaaaaaaaaaaggataaaagaaacccttccccccttcttcaagttattgctccctccattcccctggacccagggacatgcagccctacatggccacccactgtttgcagtgtctctgggtccctaagggataccattcctgtctcgtccccaaatggtaagatgacgtaaatgacccactcctaaactgaggtcagaccacctaggcttccacctggtgagccctagcagggctgagacccccagggcggcagcctgtctgctgctgagtgattcagggagaacatgtgtgcacgtgcatgtgtgtttgcccacaccggtgacacggggccctggctttccactttggatgcccgggcatccgctgctgctacatcttagccagaacttgaagtcttttgtcccagtttgggatgaaggaaaggaggaagaggcggtggctgtgtggcccccttgagtggagccatggaaggggtggcatggtgccactggggcctgtggctgtagtagccctgggccaggtaacctccagggccctgacttttccagaggctgctgccacctacttcttatcaaagaagggggagaacagttcatctgagtcagtgcacctcccctccagtctccactccctgaggatggaatcggggaaacagcatcctgccgcctcctctctgcctgcccactcaccggcaaggttgtccctctgcccagggctcagggccatgtaccagatctgtctgtgcccacccaggcacagccactgcctcccccttggctccctgctcctacccaggagagctccctatccgcctttggtcagagctgaagccatatacgactgggtgtttgtccccctactttggccccaggagtaaaaaaacttctccttttctcacttcctttcctgcctcgggaggtggcagggcagttccctggctgaggccttttgcgccccacctccaggaccaagggccattctagacagggtgtcttctaccaggacccgtccctagccttcctggcctggagggcctggtcttgcactggcagctgtaatacaaagggaactcgccccacttctcccagcctggtgctgtcctctcggcccaccatcggccaggtccagcgcttcctctggggctgacaacaggcccctgactcaccccggtcacctcccagggtccatggccagggcctctgtgtttggggggccacttgcccttcatcctgccaggcgctttgcccgccctgcctcagcctgggccctgtgcccttgagccctccacccctggcccaagacccccccaaactgtctgactctgtgtttcctgccctgaggagagaggggtcagattgcagcgggccgagtgccctctccgtcccctctcctcccacccacgccacaggccagcctactcttccctccatccatggccacacccccagccattttgtaccattatataaatatatatataaatataaatatataaatacaatatgtgaagacatcttcttggtttttattttgaaacaatttttaggcttgttccgggggtctctgtgctgcctgtactgtattgacctgttttataggtgcctttttattaaaaagaaaattcaaaa

SEQ ID NO: 2521 - DNA, 3659 bp, Homo sapiens
gcagccagtcgcggaggcggggaggctgcgcggtcagaggcgcctggagcgagcgaatcctggcccaccgcctgcccaaccgcgtgaccttgattgagttaatgaacttcacgcctcagcgtccaggtctgtaaaatggggtgtctaacgcagaccgtacagcccagctgggtttagcaaacttccgggagccagttggagcctctccccatccctagcggtgatcccaggtgacgacatgccgcggggggtcctgcggaggccaccctagggcgttgctgctgcctttgggagtgtggagctccaaaccatgtcgcgagaggcggattttgggaggccgggatcctcgcgccagggggatgtgcgagggtgtgggataaatcttaattcctccggcccacccaaagcctggaaatccagcctccgcgcctcttgccctgcgggccccgccctcagtcccgccctcatctaacccgctaccccattggtggcgtccggcggcgcggctgctgttatttttcgaatatataaggaggtggaagtggcagctgcaactagaggcttccctggctggtgcctgagcccggcgtccctcgccccccgccctccccgcatccctctcctccctcgcgcctggccctgtggctcttcctccctccctccttccccccccccccacccctcgcccgctgcctccctcggcccagccagctgtgccggcgtttgttggctgccctgcgcccggccctccagccagccttctgccggccccgccgcgatggaggtgccccagccggagcccgcgccaggctcggctctcagtccagcaggcgtgtgcggtggcgcccagcgtccgggccacctcccgggcctcctgctgggatctcatggcctcctggggtccccggtgcgggcggccgcttcctcgccggtcaccaccctcacccagaccatgcacgacctcgccgggctcggcagccgcagccgcctgacgcacctatccctgtctcgacgggcatccgaatcctccctgtcgtctgaatcctccgaatcttctgatgcaggtctctgcatggattcccccagccctatggacccccacatggcggagcagacgtttgaacaggccatccaggcagccagccggatcattcgaaacgagcagtttgccatcagacgcttccagtctatgccggtgaggctgctgggccacagccccgtgcttcggaacatcaccaactcccaggcgcccgacggccggaggaagagcgaggcgggcagtggagctgccagcagctctggggaagacaaggagaatgatggatttgtcttcaagatgccatggaagcccacacatcccagctccacccatgctctggcagagtgggccagccgcagggaagcctttgcccagagacccagctcggcccccgacctgatgtgtctcagtcctgaccggaagatggaagtggaggagctcagccccctggccctaggtcgcttctctctgacccctgcagagggggatactgaggaagatgatggatttgtggacatcctagagagtgacttaaaggatgatgatgcagttcccccaggcatggagagtctcattagtgccccactggtcaagaccttggaaaaggaagaggaaaaggacctcgtcatgtacagcaagtgccagcggctcttccgctctccgtccatgccctgcagcgtgatccggcccatcctcaagaggctggagcggccccaggacagggacacgcccgtgcagaataagcggaggcggagcgtgacccctcctgaggagcagcaggaggctgaggaacctaaagcccgcgtcctccgctcaaaatcactgtgtcacgatgagatcgagaacctcctggacagtgaccaccgagagctgattggagattactctaaggccttcctcctacagacagtagacggaaagcaccaagacctcaagtacatctcaccagaaacgatggtggccctattgacgggcaagttcagcaacatcgtggataagtttgtgattgtagactgcagatacccctatgaatatgaaggcgggcacatcaagactgcggtgaacttgcccctggaacgcgacgccgagagcttcctactgaagagccccatcgcgccctgtagcctggacaagagagtcatcctcattttccactgtgaattctcatctgagcgtgggccccgcatgtgccgtttcatcagggaacgagaccgtgctgtcaacgactaccccagcctctactaccctgagatgtatatcctgaaaggcggctacaaggagttcttccctcagcacccgaacttctgtgaaccccaggactaccggcccatgaaccacgaggccttcaaggatgagctaaagaccttccgcctcaagactcgcagctgggctggggagcggagccggcgggagctctgtagccggctgcaggaccagtgaggggcctgcgccagtcctgctacctcccttgcctttcgaggcctgaagccagctgccctatgggcctgccgggctgagggcctgctggaggcctcaggtgctgtccatgggaaagatggtgtgggtgtcctgcctgtctgccccagcccagattcccctgtgtcatcccatcattttccatatcctggtgccccccacccctggaagagcccagtctgttgagttagttaagttgggttaataccagcttaaaggcagtattttgtgtcctccaggagcttcttgtttccttgttagggttaacccttcatcttcctgtgtcctgaaacgctcctttgtgtgtgtgtcagctgaggctgggggagagccgtggtccctgaggatgggtcagagctaaactccttcctggcctgagagtcagctctctgccctgtgtacttcccgggccagggctgcccctaatctctgtaggaaccgtggtatgtctgccatgttgcccctttctcttttcccctttcctgtcccaccatacgagcacctccagcctgaacagaagctcttactctttcctatttcagtgttacctgtgtgcttggtctgtttgactttacgcccatctcaggacacttccgtagactgtttaggttcccctgtcaaatatcagttacccactcggtcccagttttgttgccccagaaagggatgttattatccttgggggctcccagggcaagggttaaggcctgaatcatgagcctgctggaagcccagcccctactgctgtgaaccctggggcctgactgctcagaacttgctgctgtcttgttgcggatggatggaaggttggatggatgggtggatggccgtggatggccgtggatgcgcagtgccttgcatacccaaaccaggtgggagcgttttgttgagcatgacagcctgcagcaggaatatatgtgtgcctatttgtgtggacaaaaatatttacacttagggtttggagctattcaagaggaaatgtcacagaagcagctaaaccaaggactgagcaccctctggattctgaatctcaagatgggggcagggctgtgcttgaaggccctgctgagtcatctgttagggccttggttcaataaagcactgagcaagttgagaaaaaaaaaaaaaaaaaaaaaaaaaaaaa

SEQ ID NO: 2522 - DNA, 9495 bp, Homo sapiens
ggccgcggaggctcgggacccggctggccgcgcggcgccgcagccgccccctcccccacaccccctcccccccgcggcggcggcgcgagcgggcggcggctgtgcggtgcggtgcagagcggaggcggaggcgggcgcgcgggcagctcgcgggcacccggccgggccggcgcgggagcgggaaagggtgcgctatgcctttaacacccgcgtacagtaggcatgtatagtggagtgtagggaaactctaggcggggttaaagttcagctcatggagcggcaatagcgctggctggctggctgcagttgagccgacttggaaatgtgaacgcaagaagcaggcttgatttttttttctccccccttctctctctctctctctctctctcttcctctctccctctttctcctctctcacccacactcacgcacacctccaaaccgcacacccagacgcacacgcataccccagcgcccggcagttatgtattctccgctctgtctcacccaggatgaatttcatcctttcatcgaagcacttctgccccacgtccgagcctttgcctacacatggttcaacctgcaggcccgaaaacgaaaatacttcaaaaaacatgaaaagcgtatgtcaaaagaagaagagagagccgtgaaggatgaattgctaagtgaaaaaccagaggtcaagcagaagtgggcatctcgacttctggcaaagttgcggaaagatatccgacccgaatatcgagaggattttgttcttacagttacagggaaaaaacctccatgttgtgttctttccaacccagaccagaaaggcaagatgcgaagaattgactgcctccgccaggcagataaagtctggaggttggaccttgttatggtgattttgtttaaaggtattccgctggaaagtactgatggcgagcgccttgtaaagtccccacaatgctctaatccagggctctgtgtccaaccccatcacataggggtttctgttaaggaactcgatttatatttggcatactttgtgcatgcagcagattcaagtcaatctgaaagtcccagccagccaagtgacgctgacattaaggaccagccagaaaatggacatttgggcttccaggacagttttgtcacatcaggtgtttttagtgtcactgagctagtaagagtgtcacagacaccaatagctgcaggaactggcccaaatttttctctctcagatttggaaagttcttcatactacagcatgagtccaggagcaatgaggaggtctttacccagcacatcctctacgagctccacaaagcgcctcaagtctgtggaggatgaaatggacagtcctggtgaggagccattttatacaggccaagggcgctccccaggaagtggcagtcagtcaagtggatggcatgaagtggagccaggaatgccatctccaaccacactgaagaagtcggagaagtctggtttcagcagcccctccccttcacagacctcctccctgggaacggcgttcacacagcatcaccgacctgtcattacaggacccagagcaagtccgcatgcaacaccatcgactcttcatttcccgacatcacccattatccagcagcctgggccttacttctcacacccagccatccgctatcaccctcaggagacgctgaaagaatttgtccaacttgtctgccctgatgctggtcagcaggctggacaggtggggttcctcaatcccaatgggagcagccaaggcaaggtgcacaacccattccttcccaccccaatgttgccaccgccaccgccaccaccgatggccaggcctgtgcctctgccggtgccagacacaaagcctccaaccacgtcaacagaaggaggtgcagcctcccccacgtcaccaacctactcgacacccagcacctcccccgcaaaccgattcgtcagtgttggaccacgggatccaagctttgtaaatatccctcaacagacacagtcctggtacctgggataaaagttgcagcgtcccaccatccaccagacagaccacctgaccccttctcaactctgtaacatggacgcaacctcaacccagcgcagttacaacttcactatcagcggaaggggagaaaaaccgattcaaatcaacttgtacatggaaacagcaagcattatggtcaaacagcaaaggccataaccttttgggatttttttttttttaaaatactttagggactgttgtaatttctcatatggtgctggaaatggttgggctttgtaacatttgaagtgtttccatggtagcgtgagcattaggtgacgtggctagcggaggactacccttgctcactgacttcctgttgtaacacactttccttacggagcctggctgtttcacagtatttcatgaatttacccacacaggtgtgatcctccttgagcattgaggaggcacatggagaactaaatcttttgtagtagctgagatctgcaatatataacgggacagtcaaagggcaatgtttttctgtaacatattggaaaaagaaaatgcagttatattccttttttatttgttcctttagtttgttttggttcagcagtcagcagttaagtatataacatggcccgcaaggacaatgaatccactcacattgcagaacaattccgaaaatggcaaactactactactactgttcagttttttaaaagttttgaaatgctgcacttacatttaaaaaaacaacaacaacattttttcaacaatttcaacaatgacacaaaaattcacatggaaatggggaagatggtctgttttgacagaaactgacaggaatcaatcaaaacaatcgaattttgaattgagtaaagtgcaatttcattggatagctaaatatctttgtaagatagagattgttgaaaattctatttttgtttttctagtcctttcaccccaggactctaaattattggggtaaaaaacagccttgcaagaaaaaggggagctatttttgctttttatgttttttattgttaaacttgtatccctttaaaaactgaaggaaattaaaaaaaaaaaacaaaaaaacaaatctaatggtgcttttaccacaatatgttaactacattaaatgctaattaattattttctgttatcaaagcacatgactaaaatgaaatcatggtatctgttaattttataagctagaagtcactataatggattacgccaattctaaaaaattttacacctatctggcatcataggatttatcagttatcagacacctcattgtaccagagattgtccagaagttttaaagacctttgcatccctgaactgggctatgggaaataataatagtaataataataataataataatgatgaaaccaatactgacacaaatgctggtgcccattcagatcaagggtacttgttagggaaaaaaaaaaaagtttgcacccccaaacgtcctgtatcttatgaaaaaaaaaacaaaaaacaaaaacaaaaaaaaaacacaaaaaaccacagaaacaaaaacaaaaaaaagtgcaagtgatttttctaccagacagcgaagcacccctttgcttcccatgcgacttcaagaaggtttcctatactatacatatatatacgttctggttggcaagccctgctgatcagagaaagtctctgcatgttctagtgttagtaactaatttttatatagttaatgtaggataaagtagagtgcattaagacacaatattgtaatccctactctaggcacttgcctttaaactatgtttttcagcccttcagaagggttctactactgtcctatacaatcaagtaactgaaattcttgggaagacactttgctcctcatctttctccccgaaacaatgttgttttgttttgttttttttccttaatttgcacgaaaacaaaaattccatatcaatgtgccttgccctggatagcgattatttgtggaattgttgcacatgctcctctattgaaaggggtttttccctagtcaagcatttggagacactttttgtaaatgtgacttttatgtcagccatcgtcagtttcaacatctagaactaaatagaaagctagttgttccgcagataggagtagtctttattgtcctgtacggtcggtggcagtgctattctgagatctgtagatgcttagaatatcagtattttggatgttgctgcattttacaatttatttggagtcttcctttattttcccccagatatatgaaaatatgcaatacctgcttatatcatgtagaaaagcttagcaattattaatttttcttttatttttttttatttgaccaaagtcggtgctgcacttgacgcagtgtgttttaggtgtttgtctttgtacttttttgtgatttttgaatgcacgtgcgcaggaagggctcctcttagagaagcagtcaaactgtgaagcactaagctgaccctgcttcaagcaattttgtttttacaactgttcctttcacaagcaagccttaaaaaaaaaaaagacaacttcctttttcttcagctcccacaccccatttttcttagcagactgcagtcaatccacattcaataaaaagtatataatgcccatttttatatgcacgtttttaaacttccaagttctgaaaattgtttactggttatctctatttaaggaaaaaaaaataaaataaaacattttggattttcatatgtgtctgataagtggttgaatagtcgtttggcgctgttgtatggtgtgattgtcagtgtatggtgtcacttcctatagccagccagcatactttgccttcccctatagcacttagctgggcattactttattatgacatatgtgcactaaaaaatgaaaaaaaggaaaaaaagaaaaaaaaaaagaaaaaatagcagctttcagtgcttcacagtgaagggaaaaaagcctagacaaacattttgtcagaaccttgcaataagccaaggtattaccagtaaattggttgtatatacaataaaattgcacccttttttaaacaaaacaaactaagcaatagtttgggcagttttagttgtttttagtgagcatgttgtagtcatgactgcaaagagagagaataaactgcccgctcagaagatatgtaatttgtattgttgtatagttttattgattacactgatttattctaccctattttataatgcaggacttttgtaatgttgtttaaatgaggaaaaatttctgtcaaattagcctagtaaaatttctgatcgttcattataaaggcagcgttcatagaattgcttttctttctttttaccccccctttgggaactggatttaagtttaaaactttcctgtttcctttttttttttttttttgtaagtatttaaatacaattatttttttctctcaatggtatagcatattcctatgcttgagaagtataggtctactgaaaaaccattgtaaatggacgttacaggtatgctgtatttttgaaggtattttgttgtattaagtttgatgaagctaaaattagggaactctgaacagatttgcaggaaaaaatgttttaaaggctttaaaacattagggaggcagtctagggtgataacgaacaggggttaagtattaaatacacgaagttacatttttgttcatgtttcattgtccagaaagcagcaggaaactattcagttgtgatcaagcaggaaaaaagaaacaccaacagttgccagtgtttttgctttttagcttaaaagcatagtgaagatgcttgaggaagactttgctacctggggtgtgtagacagacagactgagagctatcagcatttgaaggcccagcccttgactctgagacacatttgaattttttctttcccatcaaatggcattaacaagattgggcaaagatgagtccctcaaatttctgtgttttttgtttgtttgtttgtttgttttttctttgggaactgaagtcagaggcacgaacactaactcttagcatttttctgtagactttttcttctggcccttgtccctgccagcaaaacgccccttttctgatcattcgtgcgcagagggcctcccagtaatgccacgctctccatgctagagagccttctctttcctctgaggtttgaactgatgttctgtgtcttcacaccctggcatgacagttacgtgtggtcagcccgctccccaggcccgtccctgccgccgccaggtgtgggctctaggcaggccgacaaggttacacctcccagagcttgtgatcttcattttctgacagtcaaagtgtgaaggaacccagacttccccgagccacggtgttcagtcagcccacaggaatatgcaagacccatctccaaaagtttgtctttgattttttccaagcccttagccccataagctttgaatcctgtagttacagtggcataaaggactgacaaaacctggataaggaaaaaccttttttttctatgaattttttttgttttttaggggaaagggattctaagaatgtcatttaatgtactttgcatcatgtctctagaaatatctttgtccatagtggtggtggagtctctctctctctctctctttttgtttgcttctgttttctttcttgtcttcattctttcttttcttttttatttctggtagcaggcctccatagaacaaatctaaaacacaaccaccatagtaatgtaaggagagcttcagtggcacctcaaaacccacccttcgagatctgtccaaagacagtctcagaaagctgcactgcccaccggctcagctttcattcaaaaaggcttccaaggccaattctgtcttgaagtcaatgcatgtatttactgtttgacagtaaacccgctctgccttctccacgtccaaggctgtgcattcgtctaattagcgtcgtgtatgttttccttttattttttccaataaaaaagcagtgggatgaaaattgctttgatatatagcaggtaacattgaagctattccatagcacttaactgtagtgaatactgtgtcaccaattttgaaatcaatttaatgtttaatgcaaatccattacatggtgctattataggctgacaaaatgatttacacaaatgtgacaacttgggctcaattcactctgctttccaacagtgtaaatgcatagcagtgtttatctgcatgagaactatgcactaatctatctgaagaaaaaaactatatcaactttggtatctactttccgtttacttcaatccttgcctttttggtcattgttataatgccagctttaggacagaaagaattataagaaaaccagcataatacctgatatattaaaatgtagtgcctgtgaaatctgtattatattgctcttctgaagtaagatttttctacaccggtagccttcgctgtctgtcagtcaggaccttctggtataggtgatgtaaaataaccgtacaatattaatgcatgcgattccataatgcttagtgaactgtatgaatattactcaaagttatgttagtctttttttccgacttggttcttgtcagctaggtttaaaggtatttcactgagaacgcaaattctgtcttttcttgatttcggctgttttcagtattttggaggtatacatttacttaaattcagtattactcgtgttttgtttttgtttttgttttttgttttctttttcctaggggacaagcatgggtgtttgatttcagaaatcagtacctggcgagatttttgtctcaaaacgactatttgaatttcaagaactgtgctgcgaagacactctgagaacatttgcaagtcaggggcattttccttgacccttgactgatgctatgcggagactgatacattttcttaatggacaatgttcaagccaggtacccatgcttgatctgtcttcacaccagacctcctcatattaaaaggaaaaataagaaaaaaaatgtaagaaatcacatggctatttagtttcatgcacagttgcaatattttcttcaaaaataaaactctgtacaaactttgggcccgattcataagaaaaagaagtttgctattaacacgggatttttttaatatactttttttggtctaaatttgaaattacttgcttcccaaattaaataaatttcatctcatttttttccctaaaccagcacccatctgccttttattccccaaagagttacctttcccagattagggggatggtatgtggggagcagatagcggaaatgcttagaaagataagggggaccacccacagctggtcgtgagaacagggagacagtgtgtgggggtgggacctcatctgtgtgcctggtatcctgagttttacatgtagatgcattcgcctatttgattcagaaaaataaactttcccaaaatgtgtctgaaccacaagagcatacagtggaagtgctacctctaatctaaccagagcaccttcatggtggaagacacccaccaggtcatacaatgtgaacttttgtatctctgcagtggtttcaaggacaaatagtgtccaatgtattgggccatttttcctgctgtttttatactcaacttctcaaaatgaaaaaagcttttatttttcctttgacttatttgtgttgttcttattttttaaatttttattttttgataatagtctgtaagttagcctttttgggttttttttttttttttttggcttttttttttgtttgtttttttttcttttgacattgcaaccgaaggtcataaggccgctagctccgctgggacagaggcttgagagaactaacggctcggtgccttctccctggtctcagaccatcgtctctgcactgcgaaggcatttggtagcctcgccactgagatactaactagacctagactaggagctttatcaggttctaggaggtcctttaggaagactctcaaaggcaaatccctgatcccccgccccacccttagccctgccctctcaccagagcaaaattcactggggacttttcccaccacacatggaaatctgtccactcggaatacctctgttttccatttcaaattgtagggggaggggatggaacacttccagtgatggtaagagatctgttatgaaacgaaacaccccccgtgttaataacttggtctgaaatctgtttttatgagccgggccccctgtgcctctagtatacttgtattgactctcatagttacccttttagttttactgtgttctgtgaaaatttgtaattggttgagaatcactgtgggcgtccattcttattcaactaaatctccacaggttttttgagctggtgtggattagtttaactcttgtattcaaccattagtgctaccaccttctcacattacaatacaattactggaagcaagtactgcatttcctatgcaacaaaaaaggaaaaataaaaaattgctaatgctaaaaaaaaaaaaaa

SEQ ID NO: 2523 - DNA, 2001 bp, Homo sapiens; identical to SEQ ID NO: 2221

SEQ ID NO: 2524 - DNA, 3790 bp, Homo sapiens
gccgagctgcgcacgtgcggccggaagggaagtaacgtcagcctgagaactgagtagctgtactgtgtggcgccttattctaggcacttgttgggcagaatgtcacacctgccgatgaaactcctgcgtaagaagatcgagaagcggaacctcaaattgcggcagcggaacctaaagtttcagggggcctcaaatctgaccctatcggaaactcaaaatggagatgtatctgaagaaacaatgggaagtagaaaggttaaaaaatcaaaacaaaagcccatgaatgtgggcttatcagaaactcaaaatggaggcatgtctcaagaagcagtgggaaatataaaagttacaaagtctccccagaaatccactgtattaaccaatggagaagcagcaatgcagtcttccaattcagaatcaaaaaagaaaaagaagaaaaagagaaaaatggtgaatgatgctgagcctgatacgaaaaaagcaaaaactgaaaacaaagggaaatctgaagaagaaagtgccgagactactaaagaaacagaaaataatgtggagaagccagataatgatgaagatgagagtgaggtgcccagtctgcccctgggactgacaggagcttttgaggatacttcgtttgcttctctatgtaatcttgtcaatgaaaacactctgaaggcaataaaagaaatgggttttacaaacatgactgaaattcagcataaaagtatcagaccacttctggaaggcagggatcttctagcagctgcaaaaacaggcagtggtaaaaccctggcttttctcatccctgcagttgaactcattgttaagttaaggttcatgcccaggaatggaacaggagtccttattctctcacctactagagaactagccatgcaaacctttggtgttcttaaggagctgatgactcaccacgtgcatacctatggcttgataatgggtggcagtaacagatctgctgaagcacagaaacttggtaatgggatcaacatcattgtggccacaccaggccgtctgctggaccatatgcagaataccccaggatttatgtataaaaacctgcagtgtctggttattgatgaagctgatcgtatcttggatgtggggtttgaagaggaattaaagcaaattattaaacttttgccaacacgtagacagactatgctcttttctgccacccaaactcgaaaagttgaagacctggcaaggatttctctgaaaaaggagccattgtatgttggcgttgatgatgataaagcgaatgcaacagtggatggtcttgaacagggatatgttgtttgtccttctgaaaagagattccttctgctctttacattccttaagaagaaccgaaagaagaagcttatggtcttcttttcatcttgtatgtctgtgaaataccactatgagttgctgaactacattgatttgcccgtcttggccattcatggaaagcaaaagcaaaataagcgtacaaccacattcttccagttctgcaatgcagattcgggaacactattgtgtacggatgtggcagcgagaggactagacattcctgaagtcgactggattgttcagtatgaccctccggatgaccctaaggaatatattcatcgtgtgggtagaacagccagaggcctaaatgggagagggcatgccttgctcattttgcgcccagaagaattgggttttcttcgctacttgaaacaatccaaggttccattaagtgaatttgacttttcctggtctaaaatttctgacattcagtctcagcttgagaaattgattgaaaagaattactttcttcataagtcagcccaggaagcatataagtcatacatacgagcctatgattcccattctctgaaacagatctttaatgttaataacctaaatttgcctcaggttgctctgtcatttggtttcaaggtgcctcccttcgttgatctgaacgtcaacagtaatgaaggcaagcagaaaaagcgaggaggtggtggtggatttggctaccagaaaaccaagaaagttgagaaatccaaaatctttaaacacattagcaagaaatcatctgacagcaggcagttctctcactgaacacatgccttcctttcatcttgaataactttgtcctaaaatgaattttttttccccttgatttaacaggatttttgtagactttagaatttggacttacctaacaagagtataaattgacttgggttgcaagcactgagcactgttacttctatcacgtctctcttttatttctgggatataaaacaggctttaagtttcttggttgcccaagggcagagcaaggaatatctggtgtttcttgtgatgataatattttaattttaaatatccctccctcatacaagtgtatgttaccattttaatataattctttttgtacctttccttcttgttttgcgaagatttttgtggcatggattgctgtgctcactgctgtaaaaggtgacctagtgtactgggcagctggtggcggtgcagaaaagagtctcaggttattttttgtttttagttatttcttggaccttgacagtatctaatgactcctcctgaaaatgctgcagtataaaagagcaaagagctttgggaaatacctaagaagcaccttaagattagggtggcattgcttttatagattcttgattttaaagcaacaggcctttctcaggtgttgcattttttggagcaaaaactatgggttgtaatttgaataaagtgtcactaagcagttataacgtttgatggctggggggtaggaagaggatggaattgagatgtttgagcctcatttacatcaatagaggtgtaatgtactgcatttcttcatttggtaacataacaaagactttcatacaaagaacgatgatgctcctcattaagatttgtttaattcaaggtggtttggatttggtaagcctttgcactctgtagagtacttagaagacaagggcaacttacttggagttagagccaagctgtcagacggtgcccagcacacattaatgttagcttctttctgagaaaaaaatacctcttccaggccctgaaacaaaaaatacatttgctgtgaagattgaaaatgaacaaagttagaaaaaaaaacagcaaaatcagtgatttagtcagatgagtttttcgttgtaggagcacttgatttctagtgtgttttgtacagtatataactacaagatagtacattttgtagcagttcaaagccaaagttgctagcatcattttgctgttgtgccagttaatcataggatcccattaaataagtgtgctaacatcgaatatagagaaaactggtaaagaacattccagtaggaaaagaaaagaacaatcttccatttctgggcttggccaccatcaccctggtcggacctgtcctggacttccaaccttgactgctgagctcctggcttagcttcttgggttcctaattcctggtgtttaataattctctccacgatcatgtttttctgattttttttttcagaaataatgttttttaaaagacaaaaacaaagggaagaatatttaattactgagcagaagtaaatactgttggcattttgtacataatctaatttttatatgcatgttcatgctttttaatttttttatcaaaaattaagtcatctacctactacttgtaaccagcttgtttcataacatgttattttcctgtgtcattaaataattacttcaatgttgaaaaaaaaaaaaaaaaaaaaaaaaa

SEQ ID NO: 2525 - DNA, 4909 bp, Homo sapiens
ccggagggcgggcgccacggaggccggagtggtcgcagttcgggcggaggccgggccaggcggggctgtagggctggggcaggcggcgggctgcccggcgggacagctgcggcagccggcggggggcgtcctgagttggcggtcgagggcgctgccagctcccgaggggccgctcgggccccttccggcccgggtctggttgggccgcaggagcagggcgggctgcggcgcccgggtctggccctggcctacgggctaagcgcccggccccggggccgcggatccggcagccatgtgtggatcttgaagcgccatgtggtcttctgaagcgcttgacagttctaaagggctttatattgcaaactgatcaaagcgcttcgtagccccggaagcgcttaggcatctccgaagtagcgctgggcaaagtgaaggcttcctgatctcagaagcacgttgtgggcttggaaaccgacggcagcctttagtcaattttggatcgctttgacttctccaacacggtttggcatctctgaaaccttgagaactgtgatgggcagtggaaagaagagggaaaggtgcccatggcgtccgagcggggcaaggtcaagcacaactggagcagcacgtcggaagggtgtccccgcaagcgcagctgcctccgggagccctgtgatgtggccccctccagccggccagctcagaggtctgcgtcgcgttctggagggcccagcagccccaagcgcctgaaagcccagaaggaggacgatgtggcttgctcgcggaggttatcctggggctcatcccgccgcagaaataactcctcctcctccttctccccacatttcttgggccctggtgtgggcggggccgcctccaaaggctgcctgattcggaacactcgggggttcctgtcttcagggggatcccctctgcgtcctgccaacgcctctttggaagaaatggcttctctagaggaggaagcctgcagccttaaggttgattccaaagatagttctcataactccacaaactctgaatttgcagctgaagctgagggtcagaatgatacaattgaggaacccaacaaggtccagaaaaggaagagggatagacttcgagaccagggctccacaatgatctacctgaaggctatccagggcatcctggggaaatcgatgccaaaaaggaagggagaggctgccactcgggcaaaaccaagcgcagcagagcatcccagccatggagaaggaccagccaggagtgaaggaccagccaagactgcagaaggagcagccaggagtgtcacagtcactgctgctcagaaggagaaagacgcaaccccagaggtcagcatggaggaggataagacagtgccagagaggagcagcttctatgacaggagagtagttatagaccctcaagagaaacccagtgaggagccccttggggaccgaaggactgtcattgacaaatgctctccacccctagagttcttggatgactctgactctcatttagaaatccaaaagcataaagatagggaggtggtgatggagcacccctcttctggaagtgactggtctgatgttgaggagatctccacagtcagattctctcaggaggaacctgtctccctgaaaccttcagccgttccggagccttcttccttcaccaccgactatgtcatgtaccctcctcatttgtacagtagtccttggtgtgactacgccagctattggaccagcagccccaagccttctagctacccctccacaggcagcagcagcaacgatgcagcccaggttgggaagagcagccggagccgcatgagtgattattcccccaactctacagggagtgtccaaaacacctccagagacatggaggcctcagaggaaggctggtcccagaattctcgttcatttcgcttctccagaagctcagaagaaagagaggtgaaggagaaaagaacattccaagaggagatgcctccgcgtccttgtggaggacacgcatccagctccctgccaaagagccacctggagccaagcctagaggagggcttcattgacactcattgtcacctggacatgctctattccaagctatctttccaagggacctttacaaagttcagaaaaatttacagcagctccttccctaaggaatttcagggctgcatctctgacttctgtgatccccgcaccctgacagattgcctatgggaggagctgttgaaagaggatctggtctggggggcctttggctgtcaccctcattttgcacgttactacagtgagagtcaagaaagaaatcttttgcaagccttaaggcaccctaaggctgtggcatttggagaaatgggcttggattactcttacaagtgcaccacgcctgtcccagaacagcacaaggtatttgagagacagctgcagctggctgtgtctctaaagaagcccttggtgatccactgccgagaagctgatgaagatctgctagaaatcatgaaaaagtttgtgccccctgactacaagatccataggcattgcttcaccggcagctacccggtcattgagcccctgctgaagtactttcccaacatgtctgtgggcttcacggcagtgctgacatactcctctgcctgggaggcccgggaagccttgaggcagatcccactggagagaatcatcgtggaaacggatgctccctatttcctccctcgccaggttcccaaaagcctttgccagtatgcccacccgggcctggccttgcatacggtccgagagattgccagagtcaaagatcagccactctccctcaccttggctgccttgcgtgagaacaccagtcgcctctacagtctttaagcagagaaggtacagtcctcgggagtctcctagaaaagggcgaccagcagcctgacagaacacaggctggcttgaagtctgtgtctcaggtcgaggatgtgtttagagagctgattggaacacagaaaaccaggacaggatgttttcctccaagcgggtcataaggcttcagcttctgggtggtgggtggggtggggtgggcatggaatgaggggtatggggactgcctgtaatagcactgggattttgcctcccagccaaaatgctccagggtaggcagcaaagaagaaagagtgcgatatgagggtacagtgagtttggcagtccaaattctgttctctgcagcctgtttttgagtagttggtgaataaagtcacccgcctacttgtctaagcacatgtgggtgtgtaactcagttcctggttctcggttctaaaaacagacttccaactgggaaactttttgggggaaattaactggacacctatctcggaggtttattttcttgcaaccagtgaagtcgtcctcctcccttccctggataactcttcagtttgactgtcactgttctggtgtcaactccagcgtcggcacaggcagaaggacttcagctgctggtctcattggttccactgccattgatatgggggggtgcagaggagcactcattgtccatgatggagatccaggacagactgggggactccgggaagaggctttcttggggaagaggaccccaaaggaggtacttcctcctcactgatgccctcagggctgctgtgtgggtgtgttaagctgataaggttcagtttgcggcggaaactacctgctagtcttgtgtcaggggctgccagcctccttttgtttcacttttgcccccttcttgggaacatttgaccaaaaataatcctcatttcatcttgtgtacagtcctttgtgtaccccgcccaggttgagaggtgaatcagcgtaattctccgaagctctgctgggcagctcagccatgttacattgtctatgcagaataagcaggcctggtgtctgcaaatgtaccagtccttctcccgcatctcctgggtgcccccttggctttgcctctcctgtgtcctgtctttctgcgttttagaagtgagagcctctccttcaccttttgagcaactgagtcatctcaagtcctgagctctgctctgccgcctgctggtgccttgtaaaggtatactcgttacaggccctagaggttctaatggtccagggttaagtgagaggagactgtactttgtttcaaaggatccttcaccctgatctgcagtgaggtggatagatcacctggagtccctcgtctgtggtcttggaggcttaaattgtaaaatacatcccttatggaatcctaaattcctctaggtgtttttggaaggcgcatttgagccttgtgagctaaaatggaatggatttaatatttcctatctggcatttccatcttgcccctggtacacaagtcactggcctggaactcagccttgattcactgtccgtcttcacggattagctgtgctgttatgttgtctgtgctgcagattggcccatgtgggaagtcgggggggacctgatttcctgcttggaagacttgggggactgccgagcatatcaaagtgtttatagtcaccaagtgaactgcagcacaaccatctcctctccagcaagccctgaagtcagtagtgcctgcaggtgaaaccaaccagccctgtgttagaggaggaaaagcggagatgacatggaagtctccaagcctgtgccatccacctgccaaggaaaagcacaaggtgctatctacttttctctctaggatttagattatcatttatgtgctgttgcacagtgaaacctcacctgtgtgggcgtgaaagctgattggcattgtttttgattcagctttttggatggctaattgttttcactgtgctgtgggaatgcctctgtattttttcccctctttggccatctttttctgaaaataaagtgatggatcctctagccaacccaaa

SEQ ID NO: 2526 - DNA, 6251 bp, Homo sapiens
ctctgtcgccgctggagcagctgcggctcggggacccacagacacagccggggtcgggagccgcccggggcagggctcgggagagcgggccacaccatgaggccccagccccaccagaggccccgcgctgccctggcccccggtgcaccgtgctagcccccagccagggcgttggggagggcggtggccatggccagtcacgtggacctgctgacggagctgcagctgctggagaaggtgcccacgctggagcggctgcgggctgcccagaagcgccgggcccagcagctgaagaaatgggcacagtacgagcaggacttgcagcaccgcaagcgaaagcatgagcggaagcgcagcacgggcggccgccgcaagaaagtgtccttcgaggccagcgtggccctgctggaggcctcgctgaggaacgacgccgaggaagtacgctacttcctgaagaataaggtcagccctgatttgtgcaatgaggacggactcacagccctacaccagtgctgcatcgacaactttgaggaaattgtgaagctgctcctctcccatggtgccaatgtgaacgccaaggacaacgagctgtggacacctctccatgctgcagccacctgcggccacatcaacctggtgaagatcctcgttcagtatggggccgacttgcttgctgtcaactcggatgggaacatgccatatgacctctgcgaggatgaacccaccctggatgtcatcgagacctgcatggcataccagggcatcacccaagagaaaatcaacgagatgcgggtggctcctgagcagcagatgattgcggacatccactgcatgatcgcagcgggccaggacctggactggatagatgcccagggtgccacactgctgcacatagctggagccaatggatacctgcgggcagctgagctcctcctggaccatggagtgcgtgtggatgtgaaggactgggatggctgggagcccctgcatgcagctgccttctggggacagatgcagatggcagagctattggtgtcccatggagctagtctcagtgcaaggacatccatggatgagatgccaatagacctgtgcgaggaggaagagttcaaggtcctgctgctggagctaaaacacaagcatgatgtgatcatgaagtcacagctgaggcacaagtcatccttgagccggaggacctccagcgcaggcagccgtgggaaggtggtgcggcgagccagcctgtcggacaggaccaacctgtataggaaggagtatgagggagaggccatcctgtggcagcggagtgcagctgaggatcagcggacctccacctacaacggggacatcagggagaccaggacagaccaagagaataaggaccctaaccccaggctggagaagcccgtgctactctccgaatttcctaccaagatcccacgaggtgaactggacatgcctgttgagaatggcctccgggctccggtcagtgcctaccagtatgcgctggccaacggggatgtctggaaggtgcatgaggtgcctgactacagcatggcctatggcaaccctggcgtggccgacgccaccccgccctggagcagctacaaggaacagagccctcagacgcttctggagctgaagcggcagcgggctgcagccaagctgctcagccaccccttccttagcacacacctgggcagcagcatggccaggacgggcgagagtagcagtgaaggcaaggcccccttgatcggaggcagaacttcaccgtacagcagcaatgggacctcggtatattacacggtcaccagcggagatcccccactcttaaagttcaaggcccccatagaggagatggaggagaaggtgcatggctgttgccgtatctcctagtctccgtgtgatggaggagggagatgcctggggaggggctcctggaatccaggccagcccaacagccctggctggggaggtgtcagggcagctggggagaggtgggctctgcttttcagaggaactcagaccccagccctcagctggctgcccatagcatcccatgtcccacgtcccgtggttctgcttcctgctgcatcgtctgccatctgacacaaggcctgtcgtggcctcctggttcactctgctgtctgatcttgggagggtgggcttgagatcccagctctattcttggtataaaggcttctccggatcagtacatgcatgtcacattaacacacacacacacacacatatacacacacacacaagctcgatcagtgtgtgtaggaatgacatacctgggctcaggggaagcaagggggcttagaatttgtggggtattcccaaaaggatggaagttaagactcagagtctcattaccactgccaatgtggttttagcaggggaggggacctgctaagctgagacccatagtcctgctcagagttatcccaaagtctgagccaccagccacacctgacaggggtgagaagtcctcgctgtgttcagagggagccaggaatctacatgggtagatgagatagacacagacctgctccccgcagccttgttgagagccacacttctgcccatgccaggagccagctgtgtgaccatccaggggtggagggggaaaaccaggcaatttcgttcctggaatcaaccaaatcatgttttcctcttggatggaagtgtcaaaggcagaagggtgtgggagggggacaaggtcagtatttaccaaagtgtatctgattttaaaaattcctttagtctgtaaaactcctagagggagggaggtaactgaattcacttctttttgtggatcgtatcaaggtcactgggttttactggctggtgctgggaaaatgaagctaagtgaggagcttccattggaatgcttttccagggagagaggccagttaatttaaaaaaaacagtcgctagttaacagcgacagagcccagcaccctggggtctttgtgaatatccagactgtttcagcccagcccatctcagccaaccctccttagactgagctgtcagagcaagcaattaggggccagcctgcctccacctcccacccccttccacctccatcagtcatgtgtgcagagtcagtgctcgggatcccgggcccagcttttgcctttttggggatgcttggtgagacagatttgccagtcagcccttttgagttcccgcctcacccaggggctcccagcctgcacttgcaggagtggtgatgccccaagtctgcgaatccagggtgcacgtggtcaatatcccctcctgcattcaggagagccatggtagggctagagttgggtcttgcccagccctgcagtttcatagtcccagccttcctggtgctggggagggaggactgtgaatggctgttctcccctcactgctgagtctcccaggaccccctttggagatgcccatggcatgggcactgcccacaggctcagccagaacctcttggtgtacccgataagctgcaggttatcccttgctctgtgcgccttttatttgtccttaaactacctccttagagctctgaaggggtctcctagttccagattttaatttggggaacagatctgggttctttttaaccctcttctttctcagtctatgagaaacttgccctgaggggcacctgggctaggggcttgggactggaagaccatccccgccttgtgccacaactttggtcatgggatctgctctttgtcattcttagccccctactgtggcccccatagccccataacccagagagggagctggacttcagggagcctgagtgatgctttcccaggagcagggcagctggctggaccagaaagtagagggcccatgggagtgactgcacccttggtggctgctggaaggggagaggttctcagcatcaggccacctccaccccaatgccaggatagatgtattctagagtaggggtggaggcggcccaggaggctgaagacaggtgcacagatgcttcccacgaccttgccatttggggtgggctcttcaacatctcaggctgtggctggaacaggacaggatgatctaaaacacacgtaccattggctgtaaaacagtatgagcccagactgacgctgaaatccctcatgagccaaccttagctacaaggtagggagttctgagggaagccgcgtgctcctcaggagagagctgtttaggttttccgatctttttgctcaggggccaaacactgaaggcacgtactgcccaacccactgagcgcctgaggccattccctccttttccgcatgcctcctgcctcctgggctattcctctccacccagaaggctgggaatcccagctgattccctgacaggagccgacttcacacacaggtgactctcaggcattggctcatgttttcagccagggataaaccatcccttcttggggctttaagtccctggggagctttccctgtaggtctcctgggtgttgagagacaagttggagaccaacctccaatgaatgagccgcggtcattcattaattcactcacgtaatttactgagtagctgcaacatgccagcctctacgttaggttctgcggataaaggaggaataagacagagtcaggagaactgttccttgtggtttccgtcccttggggaccacaggcatcagcagtcccattcaagtcacctgaggcaaagtgtctgcatcttcgtccagcgaccctttgcttttcggctcctagaatccttagagtctgaattcctttagctgggaacagctgtcatggtcacccctggataacatttgccaccaagtatagatgctggatcttgggttccaggcagacatcatccaggtccatctggaactttcagtgatagctgccttcagccagcatctttgggggactctataatagcagcttgagatcagtgtctagaagactgttctgcaatttgctgccaaatgcatctcaggtttttaaagtcattgtttcttgctcatggtggctcatttattacatagtcccctcaccccactaatggataatgggaggaaaagttgctgcttccttcagcatcaaagcctttccttgggaatctgcctccctccatggcaggggtggattcgggagctgggagtaaccaggcaaagtcaaccagatgcctagctcctgctgagacccaggtcctatggcagctcctcattagattaaaggagaccacttccaaagcaggtgctgcatggctcaccatcatatgccccaaacaactgaaagttggcggttatcaccagactgtgagtttctggcaagtagcttggggaagctgaataaactctaggcccagggctactaaagacttcaggatagaattctccatcaaatatacagcataagtaaaactgctctgcactgtttaatccatttccaaggggcttagaaaagctaacaagggtgtgtcccctgtcctgccccaccggtttgctggctttgtaataacataagaccattgtggttgttggtgtcagataccttcccatcctgagctctctcacctacctgctctctctcctagagcaggatactggggtacttttaagaagggtgctccttttaagatgcccagaaaagctgtatttaactcttgctatttgtaacttggggatggtctcccctgccccagggcacataagagcaaaggctccaatggtcagtggatgactctgcaaaagtgaccccctgtgccagaagctatagccctctccccaacaggtctctcttgttggccagagggcctgcttcccatgggcattgcaagtgccaccgtgcggggcctggctctgcacacccaggaaaagtctgcagacccccagccctccgcaataattcaccagaccagaagccactggtgtacagagaacacttaaaaaaatgtattttatgtgaaaaaaaattaaaactctgtatactgtatcagcagctttgtgtaaaaatggcaatcaagagagtctaatatatttaaaacttttttaaaaaaaatcttcgcagatctttgatatcgtactgaggtaacttccacgtagccccttgccacgcggcaccggtgggccttgggtccaaaactgtggctcagccacatcccaaagggggcacatgtccctggagttgcttccagctgccaaggcctgtgacagaattcgctgttaagagtttttaattaaaattattaaattccttttaataaca

SEQ ID NO: 2527 - DNA, 1801 bp, Homo sapiens
atgctcagtcacagggtgacagagaaaaaaaaagtcaccaccataaaaggaggtctgcacagcctctcttaaaacaacatgccacagttaaaacttacttcagtttggacaactactcacagctactacacagagacccgaacgagtcactgatatacacctggaccaccaccaatggatatacaaatggcaaacaattttactccgccctctgcaactcctcagggaaatgactgtgacctctatgcacatcacagcacggccaggatagtaatgcctctgcattacagcctcgtcttcatcattgggctcgtgggaaacttactagccttggtcgtcattgttcaaaacaggaaaaaaatcaactctaccaccctctattcaacaaatttggtgatttctgatatactttttaccaccgctttgcctacacgaatagcctactatgcaatgggctttgactggagaatcggagatgccttgtgtaggataactgcgctagtgttttacatcaacacatatgcaggtgtgaactttatgacctgcctgagtattgaccgcttcattgctgtggtgcaccctctacgctacaacaagataaaaaggattgaacatgcaaaaggcgtgtgcatatttgtctggattctagtatttgctcagacactcccactcctcatcaaccctatgtcaaagcaggaggctgaaaggattacatgcatggagtatccaaactttgaagaaactaaatctcttccctggattctgcttggggcatgtttcataggatatgtacttccacttataatcattctcatctgctattctcagatctgctgcaaactcttcagaactgccaaacaaaacccactcactgagaaatctggtgtaaacaaaaaggctctcaacacaattattcttattattgttgtgtttgttctctgtttcacaccttaccatgttgcaattattcaacatatgattaagaagcttcgtttctctaatttcctggaatgtagccaaagacattcgttccagatttctctgcactttacagtatgcctgatgaacttcaattgctgcatggacccttttatctacttctttgcatgtaaagggtataagagaaaggttatgaggatgctgaaacggcaagtcagtgtatcgatttctagtgctgtgaagtcagcccctgaagaaaattcacgtgaaatgacagaaacgcagatgatgatacattccaagtcttcaaatggaaagtgaaatggattgtattttggtttatagtgacgtaaactgtatgacaaactttgcaggacttcccttataaagcaaaataattgttcagcttccaattagtattcttttatatttctttcattgggcactttcccatctccaactcggaagtaagcccaagagaacaacataaagcaaacaacataaagcacaataaaaatgcaaataaatatttcatttttatttgtaaacgaatacaccaaaaggaggcgctcttaataactcccaatgtaaaaagttttgttttaataaaaaatttaattattatttcttgccaacaaatggctagaaaggactgaatagattatatattgccagatgttaatactgtaacatactttttaaataacatatttcttaaatccaaatttctctcaatgttagatttaattccctcaataacaccaatgttttgttttgtttcgttctgggtcataaaactttgttaaggaactcttttggaataaagagcaggatgctgcaaagttaaaaaaaaaaaaaaaaa

SEQ ID NO: 2528 - DNA, 1581 bp, Homo sapiens; identical to SEQ ID NO: 646

SEQ ID NO: 2529 - DNA, 5973 bp, Homo sapiens; identical to SEQ ID NO: 2385

SEQ ID NO: 2530 - DNA, 4952 bp, Homo sapiens
aagtggcagttggcgtaggtgcattcggagtgcggccgaggtaactaccgagtcttcggcgggctcgcgagcccggccgcggcctgctggtttcagtgatggctcatgaagcaatggaatatgatgttcaggtgcagttaaatcatgccgaacaacagccagctcctgctggcatggccagcagccaagggggaccagccctcctccagcctgttcctgctgatgtggtcagcagccagggggtaccatccatcctccagccagctcctgctgaggtgatcagcagccaagcgacaccacccctgctccagcctgctccgcaactgtctgttgacctgacagaagtggaggtcttgggagaagacactgtggagaacatcaatccaagaacttcagaacaacataggcagggatctgatggtaatcacaccatcccagcatcttcgttgcattcaatgaccaacttcatcagcggactgcagagacttcatggcatgctggaattcctgagaccttcatcttcaaaccacagtgtagggccaatgagaacaagaaggagggtatctgcttcacggagggcaagagccggagggtctcagaggacagacagtgccaggttgagagcaccattggatgcttactttcaggtgagcaggacccagcctgacttgccagctaccacttatgattcagagactaggaatcctgtatctgaagagttgcaggtgtctagtagttctgattctgacagtgacagctctgcagagtatggaggggttgttgaccaggcagaggaatctggagctgtcattttagaagagcaactagcaggtgtctcagcagagcaagaagttacatgtatcgatggaggcaagaccctccccaaacagccatctccccagaagtctgagcctctgctaccttctgcttctatggatgaggaagaaggggacacttgtacaatatgtctggaacagtggaccaatgctggggaccaccggctctcagcattacgctgtgggcatctctttgggtataggtgcatttccacgtggcttaaaggacaagtacgaaaatgtccccagtgcaacaagaaagccaggcacagtgacattgtcgtcctttatgcccgaaccctgagagctttggacactagtgaacaggagcgcatgaaaagttccctactgaaggaacagatgctaaggaaacaggccgagttagaatcagcacagtgccgactccaactgcaggtcctcactgataagtgcactaggcttcaaaggcgtgttcaggacttgcaaaaacttacgtcacatcaaagtcagaatttacagcaacccaggggctcccaagcatgggtcctgagctgctcaccctccagccagggccagcacaagcacaagtaccacttccaaaagaccttcacagtatctcaggcaggaaactgccggatcatggcatactgtgatgctctgagctgcctggtgatatcacagccttctcctcaggcctcttttcttccaggctttggtgttaagatgttgagtactgccaacatgaagagcagtcagtacattccgatgcatggcaaacagatccgtggactggcgtttagcagttacctcagaggcttgctactctctgcttccctagacaacactattaaactgaccagcctggagacaaataccgtggtccagacttataatgctggacgtcctgtctggagctgttgctggtgtcttgatgaggctaactacatctatgctggactggccaatggttcaattctggtatatgacgtgcgaaacacgagcagtcatgtgcaggagttagtagctcagaaagccagatgcccactggtctccctgtcatacatgcccagagctgcctcagctgcatttccatatggtggggtgctggctggaaccttggaggatgcttcattctgggaacagaaaatggacttttctcattggcctcatgtgctgcccttggagccagggggctgcatagactttcagacagagaacagctcccggcactgtcttgtgacctacaggcctgataaaaatcacaccaccatacgaagtgtgctgatggaaatgtcctaccgactggatgacactggaaatccaatctgctcctgccagcctgtacatacattttttggaggacctacttgcaaactattgaccaaaaatgccattttccaaagcccagagaatgatggcaacatcctggtgtgtactggggatgaagcagcaaattctgccctgctgtgggatgctgccagtggctcgttgctccaggacctacagaccgatcagcctgtgttggacatctgcccatttgaggtgaaccgtaacagctacttggctaccttaacagagaagatggtccacatctataagtgggagtgactgtggtctcgaaaccttgaaggcatgctgctggttagatgttgtttgctagcgcctagcagccccaagcaagatccctgtttattgtctgcagtctagaacattgggaatcatggtttgtttgcattagtatgattctaggaccctaggtcactgagacactacagattgtgtatctgttatgtccactaaaagagtaattgatgggtactttatctacattatccatttcttgggtttaaagccttcattaaccattattgtatgttggaaattcttattttctttattttctgtgtgactttctggaccttagagagtgtcctctcatcatctaggatgtgagtgggcatcaagcattttctggggaatatgacatcccatctgagttgtcctgtcacttaagtatccttgaagggactaaccatcgtcttggtactgatttgatgcaacgtagatgtaaaagagtattattcagttgaacacaagagggcactgtagaaccttgtgtccggtttatttctgaccttgaaggctgacaatcttttagtaacttgtctcatctccacacaagtgtgtgatagcacacctgggtgtgctttgtggcaataacacttgtgttccaggtgtgaagtgctgggacattggcaggcccagtgatggaagcagctagtgaacgattccctttgctaatgcctagtgcattaagttcattgctttgcgaaaggtaaggaaagaggccagttgtttgagcggtggggaagattttgttttttctagccagcttaggatctcaggattggttttatccaagctagtgctttgaagaacactatctcttgccaggaaaagatgagtgataggtcaaagcttttacttgagtctcccctagtgtcagagatcaggagaaaagacataagagaatttacaaaagctattcagactgctattgaaaacatgagaagaacttgtctcccattttgagagttcctatctaaataaagccaattcctcagactgaggggctgttcttaagtgttctttatacattccagttatccagttaaagccttccccatgtgaagctgatgtttgattccagtttcctttgatttgcctccctaaccttttctagggctcagtttgtatttctttgccttgcctcagactactttgccaacccacttccacaacagaatatgcttcaagatgtgggcaggtcagtgtcctgttcatgggagaaaatggcttaacagtctgattttctcaaatgattattgaagagttgttatcgtttttattataaaacacttctgacctgtcaattcaagagctgtttctaggatctttctctccggcaaggggttgttgcactagatttccccagagttccaagttctagttgtgccttttaatgaccctttaatattttaggacataattttttccttttttaaatttttttgtagaaatagatgtttcactacgttgtccaggctggtcttggactcctggcctcaagcaatcctcccacctcagcctcctaaagtgccaaaattataggcgtgagccactgcacccggcccctatttgaagacgtcttttgtaaaagctagcttctagaacctgagaaaagctcttttctcagaggagatactccttttgatatgttaatgattaagagtggttgcccaggcctagtttcagtggcagaataggattggaattaaaaagcagaactcatctggcttcagcagattgccaccaagaggatacaggtggtcaggtcctggctggctttgtctttgggcctgggcaggcttaggatttgactttctttgaagtacctgatgctgattgattccactaatagtaggaagcaagagacttaactatgagggacgttatgtgaatcttaagtcttaccagtccttgcattagtacattaaatttggatgttttggaagcaaattcatacgatcgtgagtgatttctccaaagaaaaaaagccttgtccagcctgaccaacatggtgaaaccccatctctactaaaaatacaaaaattaactgggtgcagtggtgcgcatgcctgtagtcccagctacttgggaggctgaggcaggagaattgcttgaaccctgggaggcagaggttgcagtgagtcgagatcgcgccactgcactccagcctcggtgacagagcaagactccatctcaaaaaaaacaaacaaacaaaaaaaaaccctgatgccattcccagtccccgttgtaggacatcacatttataaatccaggctttagtcttctgggctccaccagtctctgccccaccatattcctttgtcactacctctaagtttttttccccacttgaggatttggagttaaacgaactcaaaatgtcttgtcattgtatgtattcttgcccctgctttgaaaacagggccatgggaactctgtttatgccctgttttaatgtttctgttttatgttttactgttaatatgaaaataaagaatttgctatgta

SEQ ID NO: 2531 - DNA, 1353 bp, Homo sapiens
taatggcgggcgctgcagaagatgcgcgagctcttttccgggctggggtctgcgcggccctggaggcctggccggccttgcagatcgctgtggagaatggcttcgggggtgtgcacagccaggagaaggccaagtggctggggggtgcagtggaggattacttcatgcgcaatgctgacttggagctagatgaggtggaagacttccttggagagctgttgaccaacgagtttgatacagttgtggaagacgggagtctgccccaggtgagccagcaactgcagaccatgttccaccacttccagaggggtgatggggctgctctgagggagatggcctcctgcatcactcagagaaaatgcaaggtcacagccactgcacttaagacagctagagagactgatgaggatgaagatgatgtggacagtgtggaagagatggaggtcacagctacgaatgatggggctgctacagatggggtctgcccccagcctgaaccctctgatccagacgctcagactattaaggaagaggatatagtggaagatggctggaccattgtccggagaaaaaaatgagtggggatgattggaaatggctttgggcccttatttgctgttctaagagttgtctgtaggggttttttttttgaggattgcagacctgtggactggttaccccatctccaccctctcccctgttcctctgtctggctccctccagggcaaggaaaacctagggtccttggtcttgggggtggggggaccttttccagcatattcccctgggcctttagttaacatccgagtgacgaagccgggttccccagtacagtgtcttttgggtgcggtcattgtgaggaaggggatgagtgagtgtgggtgtggctggaggaggagctagatgccggtggacagtgggcaggtggatttggggaggagaggatcagcagcagcagcagtactcagtgatagggggctggctgggtcaggaatggtgagatgaacatgcaagtggaagagagaatagttgaaaatgtgaatgaaagtagctctggagcctctcccttaccccaccccacacacacgcaacagctctgtacccctgcccagaacttggaacctcccaggaatgctgccttccttcagcccagcctccagtcctgggttccctcaggaattcgaagaccttggctaggtggtgagcttggaagagctgggctttgttttctgtctcctctaacctctttccttactccttatcccatcccatttgagttcaggggtgaggcttaagatcttaataaataataccttactgcttaaaaaaaaaaaaaaaaaaaaaaaaaaaaaa

SEQ ID NO: 2532 - DNA, 2825 bp, Homo sapiens; identical to SEQ ID NO: 2086

SEQ ID NO: 2533 - DNA, 3138 bp, Homo sapiens; identical to SEQ ID NO: 2013

SEQ ID NO: 2534 - DNA, 2172 bp, Homo sapiens
tttcccgccctctagtcgtgcgcggatctgacgcctgacgtaattgcgtagacgccattttagccggtcagacaagcactggacgtggcggccattttgttttggacaccgagcaggagctggcggccgctgcagacgaaaggcaggaaagggcaggccgggtgagcagacggatcggccgactagacagccaaccagcaacaacgaactgagctcgcatactaccgcttacgcatctaaccaaccgcccatctagctaacccgagcccctccaccgtcaactcaggttcggccggtccccggcccgcctgccggagccgtggtggcagccccgggaggagcactggcgtctgtttccttcgattctcgggattcgaagatggctgcacagtcagcgccgaaagttgtgctaaaaagcaccaccaagatgtctctaaatgagcgctttactaatatgctgaagaacaaacagccgacgccagtgaatattcgggcttcgatgcagcaacaacagcagctagccagtgccagaaacagaagactggcccagcagatggagaatagaccctctgtccaggcagcattaaaacttaagcagagcttaaagcagcgcctgggtaagagtaacatccaggcacggttaggccgacccataggggccctggccaggggagcaatcggaggacgaggcctacccataatccagagaggcttgcccagaggaggactacgtgggggacgtgccaccagaaccctacttaggggcgggatgtcactccgaggtcaaaacctgctccgaggtggacgagccgtagctccccgaatgggcttaagaagaggtggtgttcgaggtcgtggaggtcctgggagagggggcctagggcgtggagctatgggtcgtggcggaatcggtggtagaggtcggggtatgataggtcggggaagagggggctttggaggccgaggccgaggccgtggacgagggagaggtgcccttgctcgccctgtattgaccaaggagcagctggacaaccaattggatgcatatatgtcgaaaacaaaaggacacctggatgctgagttggatgcctacatggcgcagacagatcccgaaaccaatgattgaagcctgcccatcctcccatgagagactcttgttagtcaacacatctgtaaataaccttgagataacagatgagaagaaatctgattgatgctggatggacctatcacaataggctgtggacttacttgccaccagcttgtgcatttagtgtgttccttttactttttgatactgtgttgtatgaaacccttttgtcctttgatttggttttttgtttttgtttttttaggggggagggggggtttcccctcctttgcccagacttctctttgaacacaaatgcattagccttgtggctagaacaccctcttcctacctctgtctcccctcacttgtcatatgctctgacatgctaacatttcttttgttcatccctgttgcccccacagaaacatcccagaaaaaccggtcagtgttccttcctccctgatccttaggtttctgaaatagggttctgttacatcctcttcgatagcctgtttaaaatgtttagaaggtctggagctcaaaaatgcgttcttccacattgataatttagtaaactgagaacattgacatcactacagggcagcataagaggttgcttacatgtggtagcagctctggtttgattcaagttgctaccatgtacattgacagcacatataccataaccagcgtgttgggttgaattgcactttctacctttgtatgagatttacagactttccttctgggtttgtatcatgaccagaggggtactatagggttggtttatactgcaatatagaggatcagaagccatttgatttggtaggtgtgtcagaagggagaatgatggcagacgaactgctggaagaggtcagaagatagccatgctaaaatgcaattatatcctcatgtttatcccaaactaatcttggacttttccactcattagctttgttttgcccttgtttcccttgaaggtttaagttcaaccatattctgtcaactgttcagtttcagtggaatcttgtatttctggttcattataacaaactgttcgcttaaatccaaaaaaaaaa

SEQ ID NO: 2535 - DNA, 2164 bp, Homo sapiens
ctgagtctcgctggagctcttctcgcccgcccacctcatctcaacccactttccgcggggagcggcgccaagctgggccttcctcggatcaggcgtcccctgaagtcggcacgcccctctgcgtcccccttcggtcccgctaggaccccgtccgggctgccgtcgcctcgtcgctatggcgcccaccatccagacccaggcccagcgggaggatggccacaggcccaattcccaccggactctgcctgagaggtctggagtggtctgccgagtcaagtactgcaatagcctccctgatatccccttcgaccccaagttcatcacctaccccttcgaccagaacaggttcgtccagtacaaagccacttccttggagaaacagcacaaacatgacctcctgactgagccagacctgggggtcaccatcgatctcatcaatcctgacacctaccgcatcgaccccaatgttcttctagatccagctgatgagaaacttttggaagaggagattcaggcccccaccagctccaagagatcccagcagcacgcgaaggtggtgccatggatgcgaaagacagagtacatctccactgagttcaaccgttatggcatctccaatgagaagcctgaggtcaagattggggtttctgtgaagcagcagtttaccgaggaagaaatatacaaagacagggatagccagatcacagccattgagaagacttttgaggatgcccagaaatcaatctcacagcattacagcaaaccccgagtcacaccggtggaggtcatgcctgtcttcccagactttaagatgtggatcaatccatgtgctcaggtgatctttgactcagacccagcccccaaggacacgagtggtgcagctgcgttggagatgatgtctcaggccatgattaggggcatgatggatgaggaagggaaccagtttgtggcctatttcctgcctgtagaagagacgttgaagaaacgaaagcgggaccaggaggaggagatggactatgcaccagatgatgtgtatgactacaaaattgctcgggagtacaactggaacgtgaagaacaaagctagcaagggctatgaggaaaactacttcttcatcttccgagagggtgacggggtttactacaatgagttggaaaccagggtccgccttagtaagcgccgggccaaggctggggttcagtcaggcaccaacgccctgcttgtggtcaaacatcgggacatgaatgagaaggaactggaagctcaggaggcacggaaggcccagctagaaaaccacgaaccggaggaggaagaggaagaggagatggagacagaagagaaagaagctgggggctcagatgaggagcaggagaagggcagcagcagtgagaaggagggcagtgaagatgagcactcgggcagcgagagtgaacgggaggaaggtgacagggacgaggccagtgacaagagtggcagtggtgaggacgagagcagcgaggatgaggcccgggctgcccgtgacaaagaggagatctttggcagtgatgctgattctgaggacgatgccgactctgatgatgaggacagaggacaggcccaaggtggcagtgacaatgattcagacagcggcagcaatgggggtggccagcggagccggagccacagccgcagcgccagtcccttccccagtggcagcgagcactcggcccaggaggatggcagtgaagctgcagcttctgattccagtgaagctgatagtgacagtgactgagtcccagggcattcagggctggttcagacaccattattgtgagcagcaaagcacttttctagtggtctgtttgtgagcctttcacttgtttgttccccacccccaaacctttgctgttaataaagtcaacttctctttacttcccctcccagcccctatgatgtcattcagcccagcacatacctcccgcaacccccaggtgctcaaggatcttggcttgaggcttagaaacacaggccagaggcagggccaatggtttcccacaaaatgtagcacaacgaaggtcagaattcgttttttttgtttgttttttttttttccaaaataagcccagaccattaaacaagtgaaactccaacaaaaaaaaaaaaaaaaaaaaaaaaaaaaaaaaaa

SEQ ID NO: 2536 - DNA, 6362 bp, Homo sapiens
gctgccgcggcggcggcggcgcgaccgagcatcctggcggcgccgggccactgggagagtttatgtggccgaggcagacaagtggaattaggccttgctgcaggggacttcatttccttctcagtactggacccatttatgaggaggtggcttatgaaagtgtgatgttcgcgtatttcttgacaggcagtggcgtgatcttggctcactgcaacctccgactccctggttcaagcgattctcctgcctcagcctcctgagtggggattacaggccacagcaaacacaggtgtgcaggaaccgtttgtcatggaagccagggagcctgggaggcccacacccacctaccatcttgtccctaacaccagccagtcccaggtggaagaagatgtcagctcgccacctcaaaggtcctccgaaactatgcagctgaagaaggagatctccctgctgaatggggtcagcctggtggtgggcaacatgatcggctcagggatctttgtctcacccaagggtgtgctggtacacactgcctcctatgggatgtcactgattgtgtgggccattggtgggctcttctctgttgtgggtgccctttgttatgcagagctggggaccaccatcaccaagtcgggagccagctacgcttatattctagaggcctttgggggcttcattgccttcatccgcctgtgggtctcactgctagttgttgagcccaccggtcaggccatcatcgccatcacctttgccaactacatcatccagccgtccttccccagctgtgatcccccatacctggcctgccgtctcctggctgctgcttgcatatgtctgctgacatttgtgaactgtgcctatgtcaagtggggcacacgtgtgcaggacacgttcacttacgccaaggtcgtagcgctcattgccatcattgtcatgggccttgttaaactgtgccagggacactctgagcactttcaggacgcctttgagggttcctcctgggacatgggaaacctctctcttgccctctactctgccctcttctcttactcaggttgggacacccttaattttgtaacagaagaaatcaaaaacccagaaagaaatttgcccttggccattgggatttctatgccaattgtgacgctcatctacatcctgaccaatgtggcctattacacagtgctgaacatttcagatgtccttagcagtgatgctgtggctgtgacatttgctgaccagacgtttggcatgttcagctggaccatccccattgctgttgccctgtcctgctttgggggcctcaatgcatccatctttgcttcatcaaggttgttcttcgtgggctcccgggagggccacctaccggaccttctgtccatgatccacattgagcgttttacacctatccctgctttactgttcaattgcaccatggcactcatctacctcatcgtggaggatgttttccagcttatcaactacttcagcttcagctactggttcttcgtgggcctgtctgttgttggacagctctacctccgctggaaggagcccaagcggccccggcctctcaagctgagcgtgtttttccccatcgtgttctgcatatgctccgtgtttctggtgatagtgcccctcttcactgacaccattaattccctcattggcatcgggattgccctttctggagtccctttctacttcatgggtgtttacctgccagagtcccggaggccattgtttattcggaatgtcctggctgctatcaccagaggcacccagcagctttgcttttgtgtcctgactgagcttgatgtagccgaagaaaaaaaggatgagaggaaaactgactagaggtcagaggtggctttctgaggcctggaaggcaggccaaccagcaaaatcctgataacaagactctgtgggcccaactctcctgaattaaaggagccttttgacccaatcatatagtggggctcagggccagtgctcactcttattggtaagctataggagactcaggatctgggccaacctcaaggtgggggcttcagagggtggggggaagattggggaacggggggaatggtcatttagttttactcctgataggtagatgcagctcttacagatatttacttggtaaagtgcagtggggaagagggaatgctaggttgatagggctggtggcttctgaatttggtatttgaactaggagtccctatagaggggctgctttatgggaagtttttctctgaccaggtacaacacctgactttaaaggcctgaaatgctaccatttcttcctctggctcaaaattcttccctggggagagagttatattcccttatttattgatatttagtccagaacaccagttctaacgaagcatgcgtgtctcttcatctacaggatgcaataggctgattgtatttaaaaatcaaagtacccaaaactgagtccctttgggctcagaaatgtctgtggtattgggtcagactctgaccacaggttttatgctgtttagcacaatttctattgagtcttacctgcaacaatgaaccttaaagatttttttactcacgtacctgttacactttagcatacagatagatcatagatcacgttacaagcacttggctcaggtccagcaaggacagatgaacaaattcctgagtcagaagtctgttaatattgctgttttgaaggacaatcctttattttacttgagaccttacatctttgttctagctgacagtaaatctctgggtttctgttacgaactctaagagggctgaaacttctgatattcaggtggatcacctgaattctctcagctgtcaatggcttggagaacatctcatgggcccaagtcatcaaataacctgttcctctctgtaagggcagtgtgagggactgctgtgcagacccaagcaatcccaacctggtgctaggtcatttcacttttctgaaaacctcacatcaggctgcatcctcttctgtccctggcaccaggctttgtttacacttggagccaccttggtgtgggtcaccgggacagtgtactcctctcctgccagcctccccttccccgaggtgtggtggctgcagtctcaggaagagcttggtacttgtggggacttctgttttctccctgtggagatcagtgaagactgggaggaaagctgcttcaacctgagtccggctcttcagcaggctgcacaagtggaagcaactaattctggtgctcaggctgggctctccacccaagttaggcctgctctggcctaatggatcttactgtatgagcaggacggctgcattggattgtacaactgttttgtgatgcccccagacactgtcatcctgggccgagaagaacctgctagcttgacataccccatgggcttatccttaggttttggaattggtcaacagtgaggcagtctcccttcctgaccattcttctccacccagtcacagataagggaataaccttggccatatatttgctcaataaagattgaaggaagcatggtcatagttgccctgggttcagagcataatgcatatgtgaagcatggggtgacattcctactgtcatgggtttgggatttgtaacggcaaattcctgcccgacgacagggtgtcttatgcaaaggctgacttgcctgaacgctaagaacatgacttctgtctgagctaagctggcacccatcccagggctcctctggagctaatcctttaagcaaaatgtgcttgccttttaaagatccctgaccccagctttagctttctccaccagataaccagctaatcccaggaatttgctgccccccaccagtggcttctagggaaagcaaggacctcacatgccaggtgccctagtacttgcttagtgagccatgtcatcctcctttcatttttggatggtgacagcatttttcccctctgtgctggatacagacttctcccaggatcctctctttgggagcgaagccagaggatccctacagcactcaagcttcatggtggaattaatttctgccagctctttgttgtctgtctccttaaatccttttcctggtgtgcttattatcccttttgcagtgagtacagtttattaagttgtcagccctttaatattggggaaacttaatgagtataaatagcagggagcacattgtaacagcacagtgttttgtttttttcacccggttgctgtatgagaatggctttcaatcctttgtttctatgcctacagacagaaagcaagatgtctaatattagacatacaagttgctgcctgttataacggtgaattatacctttgtgcatgcctaggatgtttgttgttttaattagctgcaatatatacggcctgtgtacacagaatttaatcacttcggcaggttgaacaactccatgtagataagagcaagtgtaggcaaaggtttagaaaatggacataaagtcaaagaatgatggcaggtaggatgaaggagagatacttaggaaatcctaaaagaggcggcaagaaggtacctccctgtgtaactcaccttcccccatgacagtgagtaagagacactcacaggctatgagggtacacccctagctgaatgttctgtgttgtttccttagacctgtggtgtccgctgcaacagctactagccacgtgtagctaattacattaaaatgaaataaaattaaaagctcagtttctcagttgcgctaatcacatttcaagtgctcagcagccacccgtgtctactactacacagtgcagacacagaacatatcatcactgcagatagttctactggacaatgttacgctagaataaacaccaaggcagtcagttaaggcagctatggtttggaaaggcatacggacagagtctgcttagaagagatacaagttgttaataaaattgatcctgttgatagtagtttgtttttgtggtgggtgctgtgaagagtaaacattactcagtggaaagctaagttcagaaggtactttgtttttcctcccttgccttaagtccttggtatttataatcaatgctgaaccttctatttcactaccgctccctgttttagatattcagatttaaaaggttttcaaagaattactttcttccatgttcaaagctagattttactaaacacatgtatcacattcatatatattgtttcttggccccactgccaaaggaagtcagtcagtaatttcacaaccgttatcagagtttggaagcagaaatagctgttaactaaaatctcccactgctcagactactttctgccctaatggccattactatccagtctgtattgctacaagggacccactggtaccccttttagattctatcaaaaggaacagggttttcctagaggcaggcagcctggtggtatggcacagcagaagcttactgctaatgaaatgggaacctccccctcccttgtggtttcagcacagaacctgaatgccaggaaaaattcctgggccaagaagctaaagctaaagaaaccttccttttttcaacgtttttttttctttcaaactgtagggtcacttttgattgaggcaaaggggtcctactgtaagtggaaaagactcactcccctaacataagttttcactgtggtgggatggtgccgcccgatatgcttgatatgcttttccttccacatgttaagctaggaaacctaacaggatgtcagcagggcagttaactctggactcagagccctcaagggcatgtggcagaacctcatggacatcacaagaccatcagtctgaatccaggtcgtgggggctgtcatagccgaactccttctgcacatccagagggtacttgctccacatccgctgtctgctgctgcctctttcctcctcactcaggctgttgtagtcagcagagcctagaatgacatcccgggagtggattctaaatgtgattttcctaggctactgcaggagccccttctcttctcagaaaggtctgtttttgttcccgattgtaatgcaaaatccttgctcaataaataaaaaagaatatagaattcttttttttttaaagaaggaatcactttcctatcatctaaaccaagttccttcacactggagtattttgtcacttctcccctccgtggagtattttgtcacttctcccctccgtataggattttttgttgttgtaagagttgtagtcatattgtaaatatttttgtacctttctccttttaacgtgttattgacaaacctccccaaaagaatatgcaattgtttgattcatttctctgttatcagacaccaataaattctttttgttgggcaaaaaaaaaaaaaa

SEQ ID NO: 2537 - DNA, 7932 bp, Homo sapiens; identical to SEQ ID NO: 1266

SEQ ID NO: 2538 - DNA, 6133 bp, Homo sapiens; identical to SEQ ID NO: 2374

SEQ ID NO: 2539 - DNA, 4041 bp, Homo sapiens; identical to SEQ ID NO: 2223

SEQ ID NO: 2540 - DNA, 7856 bp, Homo sapiens
cgcgatctgctgcagctcggccgggagacggcgcgacccggcggcggggccacccgcgagtccagcgtcgccgcagccccccaatgcggccgcgagaagcagcgggggggcaggcgatcgaaggagccttcacgtaaatgggtccagtcatgcctcccagtaagaagccagaaagctcaggaattagtgtctccagtggactgagtcagtgttacgggggcagcggtttctccaaggcccttcaggaagacgatgacctcgacttttctctgcctgacatccgattagaagagggggccatggaagatgaagagctgaccaacctgaactggctgcacgagagcaagaacttgctgaagagctttggggagtcggtcctcaggagtgtcagccccgtccaggacctggacgatgacacccccccatcccctgcccactctgacatgccctacgatgccaggcagaaccccaactgcaaacccccctactccttcagctgcctcatatttatggccatcgaggactctccaaccaagcgcctgccagtgaaggatatctacaactggatcttggaacattttccgtattttgcaaatgcacctactgggtggaaaaactcagtgagacacaatttatcattgaataagtgttttaagaaagtggacaaagagaggagtcagagtattgggaaagggtcgttgtggtgcatagacccagagtatagacaaaatctaattcaggctttgaaaaagacaccttatcacccacacccacacgtgttcaatacacctcccacctgtcctcaggcatatcaaagcacatcaggtccacccatctggccgggcagtaccttcttcaagagaaatggagcccttctccaagatcctgacattgatgctgccagtgccatgatgcttttgaatactccccctgagatacaagcaggttttcctccaggagtgatccaaaatggagcgcgggtcctgagccgagggctgtttcctggcgtgcggccgctgccaatcactcccattggggtgacagcggccatgaggaatggcatcaccagctgccggatgcggactgagagtgagccatcttgtggctccccagtggtcagcggagaccccaaggaggatcacaactacagcagtgccaagtcctccaacgcccggagcacctcgcccaccagcgactccatctcctcctcctcctcctcagccgacgaccactatgagtttgccaccaaggggagccaggagggcagcgagggcagcgaggggagcttccggagccacgagagccccagcgacacggaagaggacgacaggaagcacagccagaaggagcccaaggattctctgggggacagcgggtacgcatcccagcacaagaagcgccagcacttcgccaaggccaggaaggtccccagcgacacactgcccctcaaaaagagacgcaccgaaaagccccccgagagcgatgatgaggagatgaaagaagcggcagggtccctcctgcacttagcagggatccggtcctgtttgaataacatcaccaatcggacggcaaaggggcagaaagagcaaaaggaaaccacaaaaaattaaaaacaagtcactgatttgttttgaacttacgaccatttggtttcagcatgtcaggagatttctaatgatttgtggcaatatcagcaattttttttcttttttcttgtttttggtttggttttctttcttttcttttccttttattttgttttaatttgccccctcttctttgttttggacccttaagaattttatttttaaaggagattgaagccatagaactcatattgacactcagctgttttacaaaagcttttcattatctgaagacaaaaccgaaaaagccaaaattaccattgcttcctccagcttgtcagaaacctgtggctgaatccgcagggatgtcaacgtcaatatcacaggaacacacattcggcacctagaaggcacgtgggcaaagtaatcatcgttcaggcccaacccttaggtttaaaaagtcaggttgtccatcccattgggttcactgagtgaaggcacataaagcaattgaggaggaggaggaacccctcgtccccctaggagcagacccaagcttgtggcaccaggcatctgatggtgccaggaaagccactggaattgtcacacggcgagcacagagggccggccaccagtcctcgatgcttctgaaccctgaagcccgatgacatcttacgaggtggacgttggactgttcatgcgcatcgggtgtcagtgactcatggagaagaaatggggtaaatttttagtgatgttgctaatcattgaattctgttctctattaaattaagaaaatgttccaaaagccataagcctgaagattggccctgtgcacgcacgcacacacacacacacacacacacacacacacacacacacacgaaggagagagagagaaaactgatggggaaaacaagctgtgtcttcttaactgcccaagtgaaaagcaaccaagtccaggaaattacaatagctgttaaggaaaggaaataatggtacagatctttttctgtctatcaaaactatttgatccaagtgaaaaaaaaaaaaaaactagaaagctacggaacctgccattagtattgtggtgtatttttaagattaaaggtacactgatggacaaaaaaaaaaagtaaaacatggcaaaaaataaaataactcctatactgccctcaaaatggagtttgcaattaatatcaggatttatctttgcaaaaatcagtgatttccacattcagccagtatagccagcagaaatttctgatccacaatgcatggattcctttgaagaaaaaaaagaaaaagagaaaaaaatcacaaaaacaaactttttttattcaaaagtaacaaagttcttgtaaggtaaataatgtatttagcatgaagcatgaattattttcatataaatatagaaaatagagaaaaggctatgcctgtaatttttaagcccttaggcttagagtttcttttggttttcttcttttttctttccttttctttgctttctttttttcctttttgtttttgtttttgttttttgtttttgtttttttttcgggttattttgttttggttttttgaagcaggtgtttaaggtttaaccttcttcagggacaaattctgactgttggggaacttactctgcaatataaaaatatcttcatgctctggtagggcttggatggttgaactctgtactgccttgtgtgcacttcagccccgaccccctctgattctctgttgaaaagtgtgtcctttctctctgtctgtacatgtttaacatgacgcaataatttgagggcaaacttagtagtgagtgtgtatgatagaatcaagagaattatgggacgcttacttgagaaaatcattaccatgatttggttctaggaaaaaggcagtgaataattatgcaaattagccagaagaaggggaaccgtgctaatgggccttattgggtgaggggacgagatggggttcatgtgaaggaggaagcgatgccgaggtaggaaaggccagccccagacatcctatcgccacaatgccatgtcgcaataggaagcaggggccggccatcgctaccttcagcacactgaccaacctggaattaagaccacctagattgcgagagctgaatttagaaaccagacaacgtcatgcagcccagaaactcctgttgttacctttgcctaagaaattttctttaatggcgggggcggggggcgggggtacaaagagaaatctctaaaagaatatgatcttccatccaagtggagggaaactttaaaacaaaaacacccagtactgtggctcaggatatgatgcgtgaggagagggagggaacagagatgaccttaacttttaaaaaagggactgctgtgggccaaagccaagcccatctgccaggacgaggtaatgtcagagctccatcagcccggacagtgggaactaactggtgcattccccacacttaccttccggtgggttgctgatgagagaacctgaaaaaacctacacctctacagcaggtcgaattcatgacctgaagctgaatacttccagcatatttattcagggtgtaggtgggaataaagtatcttcgcagtgctctgttccctccgtctccccagacatctgacaccctaaaagccatccacagctatggaacctgagcgacaccttgatttgtgttgtcacctgaccaagcctaaagacctccagctcagtcccccaccttcatcccaccccacagatgataaaattcagacctctctcctgaaaggcagaggttcaacattcaggactgtttctggccgaggacttcttccaattaaaacccccaccgtgggctgtctcccctcatttcatttttctaaaggggcagaggcctcttttagaaaataataaaatgcaatgtgtgtgatttacttttctgatctctttgagaaatagagaaatataaaagtgtgttcttaactccagaaccactctttttgcataaatacctcatcgggcagctttctaagtgtgattttcctgagtctcccttcgttggatctgccggaagacttgtcggggaacctttagtgagggtacttcttcctatttttcttctgtttttggaggcatacacattatgcataaccaaaacaatggctcaattgtgtttaactttgtattttgattgttgagaacaaaaacaaaaagtatcaatgtgtatgtggctgtttgtagtgaatttattggagaatgaggttgtccgtgtccttaacaagccaaggggcaggaggcaccctctcttatcccctcctccaagagcagtagagaatttaagcacaagcctatttgtgaaagaatattttgcttaagtgtcattcactttagtcttggaattccttcccaaacgtcaggtgttcttttagcttccaaactagcatatgtatccattagtctgacagatcgcctgaacaccattaagaggtgtggcgtttttgctttcatttctcctgctgggagaagtggcggttcatgtgtcattccagtatctcacatactcacacggggcaggggggagggggaaacggggaactatagcaatatttaaagatgctttggaaaccaaccgtgaacacatcaacaccacgacgtctacgattacttgctattggccctcggatacatttaagagaaagagacagtcactcttttttttcttaaatgatatacatataaacagttatttttatcctattataattgtcttttgtctttatctagtactatgtggaaagggtttgcatcatagatttttcccagccttataatataccataagctcctacttccctgcccctccctaatcagtattctttcaagagttctttggtgaagccatctatctgaaactaaaatgaaccaaacccatatttcactggtggttggagaaaaccatggccaaaacgattgtggcaggtctcaatcttgggagtttttaagaaggaatgtgccagaggccgattcccaagaacagagttttcttttgttttgcagaggcattcaatgtgtctagtgcttgctggccacagcagttactaccacagagccttctgggaggggccgttgtgttgaaggaggctcctgcctgagggacagcatcaggcagtgggctctgtagagtgagaaccaggtggaggccttctgtgcccagctcagagttctgcaccacgccaggactgcccaggccaagggctactgacgcaagttccactcattccactctgtggggggcgccttgggcctctcctggaagggctcttggagaaggaattggagttacgtacaagtgacctaaatgggaagcttttctagatgagattggattaaattccatgtgatttctctttccctttaatccaggttgggactcgtttctttctggtggatcacagctgcccagatgttgcaattgatttttatgtttctgtagagaagtatttttctttcatcttcaggattttttttgccaccaaaagaaaacattggaactctgtgtttcctcttgattgtgacttcccagtgttgacagttaagtccttagtgtcgtaggtcccagcccaccaatactatatcaaacactgttatgcacataatgcagcactgtgatctaatttaaataatacttttttattatttatactactatatataatatacatcaacacttttgctatataacctaagtgataaccctcttttagttacctgccaaactctggacttggtttatattgcagttaacacagttacaaagctgtaatggtgtctttttttcctttgtaacggaatgtgtaaatcaaagtatatacattgtgtggtgttcctgtttctggagtttcatgaggatttacacatggcattcagtgttctgtatagatctgcctacctttgtgaattcatctgttaacccctcttcctttgagagagcaccggcgatggtggttaactccttgtgttttctctctctcctactggttattcttgaattaagcacagactcgtcagctcggttgctttatcatgaataatgtgtgtgaccttgcagttcttccacagttcagcaaacaagtgctagcttcactgaccaaaaattaaggaaggaaaacacagtttttaaaacgatccatcttttaacagccgaaaccgatgtgtctatggtgctgcaccttgctgttgtacttctgaaatcagacgtgtgtgaacgatcatttctgacttaaccgtgagatgctcacgagtacccttcctgttgttttgttagcattgaaatcgagactatttatttggaatatatacaacagtgtttttccactgtatttcatttgcaaaagttgagaactgctttctctaccttttgcaaaataattgatattccatattggattctcaaagacttcgatatggtgaacctattaaacctagaaattgtattcatcctttcatgactgtggcctgagttccccagcccctctcctccttttttttagatgagatttagcacactctcagttatttaaacatgcaacatttcttgagtatgtatgttgaggccatctgagctcatagctgattcagtaaccagtttcatgctgtgtcattcacactcactacttaatactgccatggtgaaaatgtggaggaaaaatgtatccatgtgtgtctgggaagcatatacacttgtacattttttaatactctgattctgtaacatttctgagttttgttttgttttacagaaaaaaaaaaaaagtgataaagcaatcagaagaccaagaggtttactattgatgcttagggtcgtctgaccttggctggccaatagacctacacggccaaattaatttacgagagtaataatttttcaaaagccaattttttttctgtattttctgtatgaaactgccaatatcatgaatagaaagggagaaccataaaggagaaagaacgtgatgttctgttatgttcatgtaaacctaaagaaacagtgtggaggcaggcgcgatcagccgaactctagggacttggtgttgcttggaaggcatccatacctgcattttgcattcttcgtatgtaatcatattgccaaagacaaactatttcatcatttattgtaaataacacttttccccagacctaccataaagtttctgtgatgtattgtcttccagttgcaataaaaattactgagttgcatcaattgaagaaaaacaccaaaaa

SEQ ID NO: 2541 - DNA, 6251 bp, Homo sapiens; identical to SEQ ID NO: 2526

SEQ ID NO: 2542 - DNA, 3020 bp, Homo sapiens; identical to SEQ ID NO: 2322

SEQ ID NO: 2543 - DNA, 1734 bp, Homo sapiens
acgcacgcacgtctctcgctttcgcatacttaaggcgtctgttctcggcagcggcacagcgaggtcggcagcggcacagcgaggtcggcagcggcacagcgaggtcggcagcggcacagcgaggtcggcagcggcagcgaggtcggcagcggcacagcgaggtcggcagcggcagcgaggtcggcagcggcgcgcgctgtgctcttccgcggactctgaatcatggcgaccacggccacgatggcgacctcgggctcggcgcgaaagcggctgctcaaagaggaagacatgactaaagtggaattcgagaccagcgaggaggtggatgtgacccccacgttcgacaccatgggcctgcgggaggacctgctgcggggcatctacgcttacggttttgaaaaaccatcagcaatccagcaacgagcaatcaagcagatcatcaaagggagagatgtcatcgcacagtctcagtccggcacaggaaaaacagccaccttcagtatctcagtcctccagtgtttggatattcaggttcgtgaaactcaagctttgatcttggctcccacaagagagttggctgtgcagatccagaaggggctgcttgctctcggtgactacatgaatgtccagtgccatgcctgcattggaggcaccaatgttggcgaggacatcaggaagctggattacggacagcatgttgtcgcgggcactccagggcgtgtttttgatatgattcgtcgcagaagcctaaggacacgtgctatcaaaatgttggttttggatgaagctgatgaaatgttgaataaaggtttcaaagagcagatttacgatgtatacaggtacctgcctccagccacacaggtggttctcatcagtgccacgctgccacacgagattctggagatgaccaacaagttcatgaccgacccaatccgcatcttggtgaaacgtgatgaattgactctggaaggcatcaagcaatttttcgtggcagtggagagggaagagtggaaatttgacactctgtgtgacctctacgacacactgaccatcactcaggcggtcatcttctgcaacaccaaaagaaaggtggactggctgacggagaaaatgagggaagccaacttcactgtatcctcaatgcatggagacatgccccagaaagagcgggagtccatcatgaaggagttccggtcgggcgccagccgagtgcttatttctacagatgtctgggccagggggttggatgtccctcaggtgtccctcatcattaactatgatctccctaataacagagaattgtacatacacagaattgggagatcaggtcgatacggccggaagggtgtggccattaactttgtaaagaatgacgacatccgcatcctcagagatatcgagcagtactattccactcagattgatgagatgccgatgaacgttgctgatcttatctgaagcagcagatcagtgggatgagggagactgttcacctgctgtgtactcctgtttggaagtatttagatccagattctacttaatggggtttatatggactttcttctcataaatggcctgccgtctcccttcctttgaagaggatatggggattctgctctcttttcttatttacatgtaaataatacattgttctaagtctttttcattaaaaatttaaaacttttcccataaactctatacttctaaggtgccaccaccttctctagtaactta

SEQ ID NO: 2544 - DNA, 4807 bp, Homo sapiens; identical to SEQ ID NO: 2485

SEQ ID NO: 2545 - DNA, 3149 bp, Homo sapiens
cctttcccagagtgctctgcgccgtgaagaagcggctcccggggactgggggcattttgtgttggctggagctggagtaacaagatggcgtcgtccgcggagtgacaggggtccctctgggccggagccggcggcagtggtggcagcggtatcgccgccctagctcaccgcgccccttttccagcccgcgacgtcgccgcgcaagcgaggcagcggcggccgccgagaaacaagtggcccagcctggtaaccgccgagaagcccttcacaaactgcggcctggcaaaaagaaacctgactgagcggcggtgatcaggttcccctctgctgattctgggccccgaaccccggtaaaggcctccgtgttccgtttcctgccgccctcctccgtagccttgcctagtgtaggagccccgaggcctccgtcctcttcccagaggtgtcggggcttggccccagcctccatcttcgtctctcaggatggcgagtagcagcggctccaaggctgaattcattgtcggagggaaatataaactggtacggaagatcgggtctggctccttcggggacatctatttggcgatcaacatcaccaacggcgaggaagtggcagtgaagctagaatctcagaaggccaggcatccccagttgctgtacgagagcaagctctataagattcttcaaggtggggttggcatcccccacatacggtggtatggtcaggaaaaagactacaatgtactagtcatggatcttctgggacctagcctcgaagacctcttcaatttctgttcaagaaggttcacaatgaaaactgtacttatgttagctgaccagatgatcagtagaattgaatatgtgcatacaaagaattttatacacagagacattaaaccagataacttcctaatgggtattgggcgtcactgtaataagtgtttagaatctccagtggggaagaggaaaagaagcatgactgttagtacttctcaggacccatctttctcaggattaaaccagttattccttattgattttggtttggccaaaaagtacagagacaacaggacaaggcaacacataccatacagagaagataaaaacctcactggcactgcccgatatgctagcatcaatgcacatcttggtattgagcagagtcgccgagatgacatggaatcattaggatatgttttgatgtattttaatagaaccagcctgccatggcaagggctaaaggctgcaacaaagaaacaaaaatatgaaaagattagtgaaaagaagatgtccacgcctgttgaagttttatgtaaggggtttcctgcagaatttgcgatgtacttaaactattgtcgtgggctacgctttgaggaagccccagattacatgtatctgaggcagctattccgcattcttttcaggaccctgaaccatcaatatgactacacatttgattggacaatgttaaagcagaaagcagcacagcaggcagcctcttccagtgggcagggtcagcaggcccaaacccccacaggcaagcaaactgacaaaaccaagagtaacatgaaaggtttctaagcatgaattgaggaacagaagaagcagagcagatgatcggagcagcatttgtttctccccaaatctagaaattttagttcatatgtacactagccagtggttgtggacaaccatttacttggtgtaaagaacttaatttcagtataaactgactctgggcagcattggtgatgctgtatcctgagttgtagcctctgtaattgtgaatattaactgagatagtgaaacatggtgtccggttttctattgcattttttcaagtggaaaagttaactaaatggttgacacacaaaaattggtggagaaattgtgcatatgccaattttttgttaaaaccttttgttttgaactatactgctttgagatctcatttcagaagaacggcatgaacagtcttcagccacagttgtgatggttgttaaatgctcacaattgtgcattcttagggtttttccatccctggggtttgcaagttgttcacttaaaacattcttaaaatggttggcttcttgtctgcaagccagctgatatggtagcaaccaaagattccagtgtttgagcatatgaaagactctgcctgcttaattgtgctagaaataacagcatctaaagtgaagacttaagaaaaacttagtgactactagattatccttaggactctgcattaactctataatgttcttggtattaaaaaaaaagcatatttgtcacagaaatttagttaacatcttacaactgaacatgtatgtatgttgcttagataaatgtaatcactgtaaacatctatatgatctgggattttgtttttattttgaaatgggagcttttttgtttacaagttcattaaaaactaaaaactgtttctgtaaggaaatgagattttttttaaacaacaaaaaatgccttgctgactcactattaaataaaaatctccccaattttttgatagactacttcaagccatttgttacatggtattcctttgcaagtcaatttaggtttcgtgttataacttttcctctttttttaagaaaaatgaaaaaagtaattcttttgtctgaaggggaaaggcattctttcatttttttctttttttttttttttttttatgacttgcaggcacaatatctagtactgcaactgccagaacttggtattgtagctgctgcccgctgactagcagctggactgattttgaataaaaatgaaagcattaaagggtttccctacaaaacatttttctttaaaatacttttgaaatggctataagcagttgactttcacccttggagagcatcacactgtgtgaggttcagtgattgttgaccctccccagcccctcctgcttctttaagttatctgtgtgcgtgcgcttcctctcaatcttctttgcacgctcatttctttttctctgacccatgagaaaggaaaacttactgatgataatttttaaatagtgtaatttattcatttatagcatgtcaggataaattaaaagaacatttgtctggaaatgctgccgggagcctattgtgtaaatgtaggtattttgtaaaataaccttgaaattg

SEQ ID NO: 2546 - DNA, 2989 bp, Homo sapiens
ggcgcgcgggcgagcggttgtgcttgtgcttgtggcgcgtggtgcgggtttcggcggcggctgaggaagaagcgcgggcggcgccttcgggaggcgagcaggcagcagttggccgtgccgtagcagcgtcccgcgcgcggcgggcagcggcccaggaggcgcgtggcggcgctcggcctcgcggcggcggcggcggcagcggcccagcagttggcggcgagcgcgtctgcgcctgcgcggcgggccccgcgcccctcctccccccctgggcgcccccggcggcgtgtgaatggcggcctccgcggcggcagcctcggcagcagcggcctcggccgcctctggcagcccgggcccgggcgagggctccgctggcggcgaaaagcgctccaccgccccttcggccgcagcctcggcctctgcctcagccgcggcgtcgtcgcccgcggggggcggcgccgaggcgctggagctgctggagcactgcggcgtgtgcagagagcgcctgcgacccgagagggagccccgcctgctgccctgtttgcactcggcctgtagtgcctgcttagggcccgcggcccccgccgccgccaacagctcgggggacggcggggcggcgggcgacggcaccgtggtggactgtcccgtgtgcaagcaacagtgcttctccaaagacatcgtggagaattatttcatgcgtgatagtggcagcaaggctgccaccgacgcccaggatgcgaaccagtgctgcactagctgtgaggataatgccccagccaccagctactgtgtggagtgctcggagcctctgtgtgagacctgtgtagaggcgcaccagcgggtgaagtacaccaaggaccatactgtgcgctctactgggccagccaagtctcgggatggtgaacgtactgtctattgcaacgtacacaagcatgaaccccttgtgctgttttgtgagagctgtgatactctcacctgccgagactgccagctcaatgcccacaaggaccaccagtaccagttcttagaggatgcagtgaggaaccagcgcaagctcctggcctcactggtgaagcgccttggggacaaacatgcaacattgcagaagagcaccaaggaggttcgcagctcaatccgccaggtgtctgacgtacagaagcgtgtgcaagtggatgtcaagatggccatcctgcagatcatgaaggagctgaataagcggggccgtgtgctggtcaatgatgcccagaaggtgactgaggggcagcaggagcgcctggagcggcagcactggaccatgaccaagatccagaagcaccaggagcacattctgcgctttgcctcttgggctctggagagtgacaacaacacagcccttttgctttctaagaagttgatctacttccagctgcaccgggccctcaagatgattgtggatcccgtggagccacatggcgagatgaagtttcagtgggacctcaatgcctggaccaagagtgccgaggcctttggcaagattgtggcagagcgtcctggcactaactcaacaggccctgcacccatggcccctccaagagccccagggcccctgagcaagcagggctctggcagcagccagcccatggaggtgcaggaaggctatggctttgggtcaggagatgatccctactcaagtgcagagccccatgtgtcaggtgtgaaacggtcccgctcaggtgagggcgaggtgagcggccttatgcgcaaggtgccacgagtgagccttgaacgcctggacctggacctcacagctgacagccagccacccgtcttcaaggtcttcccaggcagtaccactgaggactacaaccttattgttattgaacgtggcgctgccgctgcagctaccggccagccagggactgcgcctgcaggaacccctggtgccccacccctggctggcatggccattgtcaaggaggaggagacggaggctgccattggagcccctcctactgccactgagggccctgagaccaaacctgtgcttatggctcttgcggagggtcctggtgctgagggtccccgcctggcctcacctagtggcagcaccagctcagggctggaggtggtggctcctgagggtacctcagccccaggtggtggcccgggaaccctggatgacagtgccaccatttgccgtgtctgccagaagccaggcgatctggttatgtgcaaccagtgtgagttttgtttccacctggactgtcacctgccggccctgcaggatgtaccaggggaggagtggagctgctcactctgccatgtgctccctgacctgaaggaggaggatggcagcctcagcctggatggtgcagacagcactggcgtggtggccaagctctcaccagccaaccagcggaaatgtgagcgtgtactgctggccctattctgtcacgaaccctgccgccccctgcatcagctggctaccgactccaccttctccctggaccagcccggtggcaccctggatctgaccctgatccgtgcccgcctccaggagaagttgtcacctccctacagctccccacaggagtttgcccaggatgtgggccgcatgttcaagcaattcaacaagttaactgaggacaaggcagacgtgcagtccatcatcggcctgcagcgcttcttcgagacgcgcatgaacgaggccttcggtgacaccaagttctctgctgtgctggtggagcccccgccgatgagcctgcctggtgctggcctgagttcccaggagctgtctggtggccctggtgatggcccctgaggctggagcccccatggccagcccagcctggctctgttctctgtcctgtcaccccatccccactcccctggtggcctgactcccactccctggtggccccatcccccagttcctcacgatatggtttttacttctgtggatttaataaaaacttcaccagttaaaaaaaaaaaaaaaaaaaaaaaaaaaaaa

SEQ ID NO: 2547 - DNA, 1284 bp, Homo sapiens
agttgttatacggcttttgtcttaacgaagccacccattacggtatgatgatgtcaaacgtgatgctgatgctacagttacagcccctgctggcgcagcctctctgattctctctccctctccgcgtccagtgctgggctttttcagacaagtgcatctcctaaccaggtcacatttcagccgcgacccactctccgccagtcaccggaggcagaccgcgggaggagagctgaggacagccgcgtgcgcttcgccagcagcggggtgggaggaaggacattaaaatactgcagaagtcaagacccccccaggtcgaacccagaccacgatgcgcgccccgggctgcgggcggctggtgctgccgctgctgctcctggccgcggcagccctggccgaaggcgacgccaaggggctcaaggagggcgagacccccggcaatttcatggaggacgagcaatggctgtcgtccatctcgcagtacagcggcaagatcaagcactggaaccgcttccgagacgttccctcgtccgacccacccagtacaacgcaggccacaccatgacctctcccgttttctccttaaactgcgtgcatccacaagttccttggaaatttgtttaaaacacacatgcttcataggctatccagccaagtgatgggaagaggcagagatttggatctttttgttaccgtcagacaagtgactgtttctccccaaagtcaaactggcaggttgtaattcacagaggacagcaggaaccacgggcagccaggtctccaggctgagtggccgggccccgcgatgggctgctgatctccgccttcgccccacatgcgacctgtccagccgcaggagcctggagccccgcgaggccttcccgaagcacctgcaggcccagcgcagatgagccgcagtctcctgccgcttcctgggcagcagcccggccacagcagcgagggggcggcagcaggccggcccatccggaatccatgtgtcactggcctaggcctccctccgactcgctggctgtttgatctgccaaaatgggaccagtgaaggtcagagggaaaagaaatgcttaatcagaacaggaaaggtttaaaataaaagattcctccccacctcccttcttccacctgcttccaatagccagctccgtgggtgagaataaatgacttactgcttgaccccatggcactgggctacccacctgtctctctgtattggtgccaaccacttcccccttcctctcatgctcatcagaagaaaggcactagatttga

SEQ ID NO: 2548 - DNA, 2847 bp, Homo sapiens
caaacaaaaaattcctacccgagaagactcatgactctggaacacagtgagtgcagctgttatggtaagtgaaacagctaatgatctggcagaaccttcaagatacaaggtaaagagaaaaaaagccaggcgcagggtagtccacttgctgtcttttgtgtgaatctatctgtgtttttaaatgcagagactaaaggaattggcagtaggtaggcatcgcctccagggagtggaattggattactgggaggcacagagagaggtgtactttcttttcactgcaaaccttttgtgcatccagccttctgccttaaaaaaaaaaaaaatctgcatatggatcattcttcaaacaacagaaaaaggaaaccaaataaaaaaaaatctacccaaagaaaattttttcgtaataaaaattgttccaagcctcagagctggctcccatgttttgagcaacatcagctattcatgtattcagctgaagctcatccttaggtttttgatcaagctgtgccatgtttttcatttcctttgatagggtttctcagttcccgtcttgtcagtgaagtggtttttagttgaactgttatttgcaatagatgaaagtaaacagtgcaagacattaattgtggtgtttctactttaaaaacaatcagataaaattctagaacaagatttgctgttcggtaggaagatcagattcttttccctatacacttaatgctacgtattcatgctccagtgcagactgctggcaaggtaaagaggctgacaaccagagttgtaattaggtcctgcttgtttcctttagagtttacagtccagaaagttcatggaaataatgagagtcttatagcattttgttatgcattgaaatgtattctcatatgttaaagtcctattccccagtactttagaatgtgacctgatttggaaataaggtcattacagatgtaagtaaagatgaggtcacactggagtaaggtgggctataatccaatatgagcatgtccttgtagaaagggaaaatatttacacagccacatacacagggagaactccatgtgaagatgaaggcagagaccagagtgatggttctaccagacaaggaatgctgaagattggcagcaaactaccacatgctaggagagggtaatgacacagattcttccttgcagcaatcagaagaaaggacccctgctaacactggatctctggcttctgggatccaaaacgactcagtggtcagcggaaacttgatgatagcatagtggtcaagcttgtttctcctgggagcgctcttccgaggatatttgggctgtctccggagtcgcagtgtcttcggccgccggaaggaagaagagtaagggggaatgtgtggaagtacccaacatggatggggagagctggaaacgtctgcctgctctgagctgtgttggaaacctgaggaggaagttgccattaatttctgcaagaaaaaaatgaaagtgtaccagtcagagttgttaaagcagaaaaggattttactgaaagaacataggattgctcccagagcttccaggagggctgatgaacaagccttgagaagccagcaggaagaatggcaggccaggcaggcagagccatggccaagactgtaccacagatcaacctcagggaagcacactgatgcctctacagggactcagacatctcagtttcaatcagtaccaccaatgccactgaacactggacttggctgctgctgctttcaccactgtaatggattctccactttgcctgtttctttgtccaaattcacagtgccagcctgctgcatttaattgaccaggtctgtttcagtcacccatgacttaaactgccaggggtgctggggaacaatcatcaggttttggggttcccatgctgggaagtgggcatgagcagtgaatggagttaatagagggatgatataccaggaagttaaaaaaaaagaaattacagtcatctacaatattgagagaaatgattttttataaaaagcagtttttcttctatgctgcctatgtgaaagcaataaatatccaaagcaatgttatgagtagtgtattaaaattaacatgggtattttaagacttctttgggaggtgagagcaggtccatatgtacatacaaatcatttttgagatggcccctggagggggttctgtggtaagaacctgaggagggcctcttagagtagtcctgattgatagttgtcaagaaaacagggactttacttgacaactacaagaatcttaatttttccaaccaccagtgaacttggaagaagacttcaagtttttgatgagatcatggcattgactgacatcttgatttcagcctcgtgagatgttgattagaggaccaagttatcctgctctggactccttacttaaagaaactcagatattagatttgtgttgtattaagttgctaaatttatggtaatttgttatgcagcaatagaaaactaatacagtgacaaataaaatattaccaaaatgttcttcaatagggacagattaagtaaatgatgatacattcacacaatggagtaatattagttttaataggaataaagaatatctgtgtgaggtgtttttatatgctaacttttgtataagaaagactatgaatacatacacaccaatgcttatattttcaatatgaaatagtaggatgataaatcaaattaaataaaaaatggttacttagaagaggagtcaaggaccaaagagaagaaaacaggattgacaagagaattttgtaaatataccttgttatgtttttgacttcggtactatgtaaaatgtttacataatgaaagct

SEQ ID NO: 2549 - DNA, 4447 bp, Homo sapiens
ggagacgctgggcgcgctgtggggcgggggcgaggttcgggctggttgttccgttgcgagctgcagctgcgatctctgtggtaggcccagaagtgtatgctgacttgtaaagtgaagaagccagtggtgctgcgggtgttcttttggggtagtgtctgggatccagtacgagttgaatcattgttcaaataaggtgtaattgaaaagtgatcctctcttcagagatgtcaaaaacaaacaaatccaagtctggatctcgctcttctcgctcaagatctgcatcaagatctcgttctcgttcattttcgaagtctcggtcccgaagccgatctctctctcgttcaaggaagcgcaggctgagttctaggtctcgttccagatcatattctccagctcataacagagaaagaaaccacccaagagtatatcagaatcgggatttccgaggtcacaacagaggctatagaaggccctattatttccgtgggcgtaacagaggcttttatccatggggccaatataaccgaggaggctatggaaactaccgctcaaattggcagaattaccggcaagcatacagtcctcgtcgaggccgttcaagatcccggtccccaaagagaaggtccccttcaccaaggtccaggagccattctagaaactctgataagtcgtcttctgaccggtcaaggcgctcctcatcctcccgttcttcctccaaccatagccgagttgaatcttctaagcgcaagtctgcaaaggagaaaaagtcctcttctaaggatagccggccatctcaggctgccggggataaccagggagatgaggccaaggagcagacattctctggaggcacctctcaagatacaaaagcatctgagagctcgaagccatggccagatgccacctacggcactggttctgcatcacgggcctcagcagtttctgagctgagtcctcgggagcgaagcccagctctcaaaagccccctccagtctgtggtggtgaggcggcggtcaccccgtcctagccccgtgccaaaacctagtcctccactttccagcacatcccagatgggctcaactctgccgagtggtgccgggtatcagtctgggacacaccaaggtcagttcgaccatggttctgggtccctgagtccatccaaaaagagccctgtgggtaagagtccaccatccactggctccacatatggctcatctcagaaggaggagagtgctgcttcaggaggagcagcctatacaaagaggtatctagaagagcagaagacagagaatggaaaagataaggaacagaaacaaacaaataccgataaagaaaaaataaaagagaaagggagcttctctgacacaggcttgggtgatggaaaaatgaaatctgattcttttgctcccaaaactgattctgagaagccttttcggggcagtcagtctcccaaaaggtataagctccgagatgactttgagaagaagatggctgacttccacaaggaggagatggatgatcaagataaggacaaagctaagggaagaaaggaatctgagtttgatgatgaacccaaatttatgtctaaagtcataggtgcaaacaaaaaccaggaggaggagaagtcaggcaaatgggagggcctggtatatgcacctccagggaaggaaaagcagagaaaaacagaggagctggaggaggagtctttcccagagagatccaaaaaggaagatcggggcaagagaagcgaaggtgggcacaggggctttgtgcctgagaagaatttccgagtgactgcttataaagcagtccaggagaaaagctcatcacctcccccaagaaagacctctgagagccgagacaagctgggagcgaaaggagattttcccacaggaaagtcttccttttccattactcgagaggcacaggtcaatgtccggatggactcttttgatgaggacctcgcacgacccagtggcttattggctcaggaacgcaagctttgccgagatctagtccatagcaacaaaaaggaacaggagtttcgttccattttccagcacatacaatcagctcagtctcagcgtagcccctcagaactgtttgcccaacatatagtgaccattgttcaccatgttaaagagcatcactttgggtcctcaggaatgacattacatgaacgctttactaaatacctaaagagaggaactgagcaggaggcagccaaaaacaagaaaagcccagagatacacaggagaatagacatttcccccagtacattcagaaaacatggtttggctcatgatgaaatgaaaagtccccgggaacctggctacaaggctgagggaaaatacaaagatgatcctgttgatctccgccttgatattgaacgtcgtaaaaaacataaggagagagatcttaaacgaggtaaatcgagagaatcagtggattcccgagactccagtcactcaagggaaaggtcagctgaaaaaacagagaaaactcataaaggatcaaagaaacagaagaagcatcggagagcaagagacaggtccagatcctcctcctcttcctcccagtcatctcactcctacaaagcagaagagtacactgaagagacagaggaaagagaggagagcaccacgggctttgacaaatcaagactggggaccaaagactttgtgggtccaagtgaaagaggaggtggcagagctcgaggaacctttcagtttcgagccagaggaagaggctggggcagaggcaactactctgggaacaataacaacaacagcaacaacgattttcaaaaaagaaaccgggaagaggagtgggacccagagtacacacccaaaagcaagaagtattacttgcatgatgaccgtgaaggcgaaggcagtgacaagtgggtgagccggggccggggccgaggagcctttcctcggggtcggggccggttcatgttccggaaatcaagtaccagccccaagtgggcccatgacaagttcagtggggaggaaggggagattgaagacgacgagagtgggacagagaaccgagaagagaaggacaatatacagcccacaaccgagtaggggccacccttgacgggattcctgcccaggggagagaggcgctgggaagatggctggtgaggagcttaacagaggaacctcaagaagattctgaaaatcctacccccaccccccaccagccgcacagattgtactaccgcgagaggcatccctggcgctgtctcccactggacagaggaggctggccatggggcccaggggtcaggcccagcttttgagcagaatacaacgcattgggctttagctgtttttctcatttgttggtgtgtggggtgggggcaggggtagggcgggagagcgatgcttggatttttgtttcctattagaaaccaacagttttgttctaatttcatttcatttggagctaagatgactaatttgatgattttcgatctcttttcccctgtcctgattttaaaagccccctcctttttttttttttttttctttttttaggcatatgtagtaatattagaaacatttaatttgggaaactttgattcttgaaagagaaaacaaaagcatgtgaataaactttgaagtgttcacctcagtttgggaccaaactgcttggatctttgtaaaaaccggttttgtatgtcaaggaggagtttaaggcctttccgaccaccttgtgttccccttttctgcgcagccatgtatcacgtggagttgctccttaccacacctcacgtgcccctgagccctatttcctgatttcttctgggctggacttccccgttctccaccagcagctccagtatcccaaactttctagtcctgctgatcctcccagcaacggggtggaaactggagggcagtgtctggtctgttttctaagaaacttatgaattctattatctttacaaatatgagaaaattttttcaatattttttattaatctttttataaaatgaaaagaaactcctatgatcgattaaggaaggtggttatggctgggtggttcaggggtttttttgggtttctttttttttttctttgtctttttaaccttaagctgtttaagttgaagcattctcagatgtttggggggaaacatcctcttaaaatgggtccttgtgcttgccttctggggaggcggtcctgagcaggtgaatcataaggcatttatgcatatgttatatgcggactgcacccacctctcccccccagcctttgcctcttgcgttgttgtgctgctttccccttactttgctacatttctatagttaagttggttttacttgaatgattcatgtttagggggaaaatgaaaatctcccttaaaatttgtttcaactcctcctgcaaataaaataaatgaagtggcagatgtaaaaaaaaaaaaaaaaaa

SEQ ID NO: 2550 - DNA, 9560 bp, Homo sapiens; identical to SEQ ID NO: 103

SEQ ID NO: 2551 - DNA, 2711 bp, Homo sapiens
atgcgcactcttaagaggtcgaacggggagggcggcaggggctctggaacggaagtgacgcatggtacttgcgcaaagacgacgaggaggctgcgaaaagttaagggccggaccgcaggctgtgctcgcttccggaagtggcttctgcgacaacatgcttgcggacctcggcttaatcggaaccataggcgaggatgacgaggtgccggtggagcccgagtctgactccggggacgaggaagaggaggggcccattgtgctgggcagacgacaaaaagctttggggaagaaccgcagtgctgatttcaaccctgatttcgttttcactgagaaggaggggacgtacgatggcagctgggccctggctgatgtcatgagccaactcaagaagaagagggcagccactacattagatgagaagattgagaaagttcgaaagaaaaggaaaacagaggataaagaagccaagtctgggaagttggaaaaggagaaagaagcaaaggaaggctctgaaccaaaggagcaggaagaccttcaagagaatgatgaggaaggctcagaagatgaagcctcggagactgactactcatcagctgatgagaacatcctcaccaaagcagatacactcaaagtaaaggatcggaagaagaagaagaagaaaggacaggaagcaggaggattttttgaagatgcatctcagtacgatgaaaacctctcgttccaggacatgaacctttcccgccctcttctgaaggccattacagccatgggcttcaagcagcccaccccgatccagaaggcgtgcatacctgtgggtctattggggaaggacatctgtgcctgtgcagccactgggacaggtaaaactgccgcctttgccctgcctgttttggagcgtctgatttataaaccccgccaggctccagtcacccgcgtgctggtgctagtgcccacccgagagctgggcatccaggtgcactctgtcaccagacagctggcccagttctgcaacatcaccacctgcctggctgtgggcggcttggatgtgaagtctcaggaagcagctcttcgggcagcgcctgacatcctcatcgccaccccaggccggctcatcgatcacctccacaactgcccttccttccacctgagcagcatcgaggtgctcatcctggacgaggctgacaggatgctggatgagtactttgaggagcagatgaaggagatcatccgaatgtgttcccaccaccgccagaccatgctcttctcggccaccatgacagacgaggtgaaagatctggcttctgtctccttgaagaatcctgtccggatatttgtgaacagcaacacagatgtggctcccttcctgcggcaggagttcatccggatccggcctaatcgtgaaggagaccgggaagccatcgtggcagctttgttgacgaggaccttcactgaccatgtgatgctgttcacgcaaaccaagaagcaggcccaccgcatgcacatcctcctggggctcatggggctgcaggtgggtgagctccatggcaacttgtcacagacgcagcggctggaggccctccggcgttttaaggatgaacagattgacatcctcgtggccactgatgtggcagcccgtggacttgacattgagggggtcaaaacggtaatcaacttcacaatgcctaataccatcaaacattatgtccaccgggtggggcgaacagcacgtgctggcagggctgggcgctcagtctctctggtgggagaagatgagcggaagatgctgaaggagattgtaaaagctgccaaggcccctgtgaaggccaggatacttccccaagatgtcatcctcaaattccgggacaagattgagaaaatggagaaagatgtgtatgcagttctgcagctagaggcggaggaaaaagagatgcagcagtcagaagcccagatcaatacagcaaagcggctcctggagaaggggaaggaggcagtggtccaagagcccgagaggagctggttccagaccaaagaagagaggaagaaggagaaaattgccaaagctctgcaggaatttgacttggccttaagaggaaagaagaaaaggaagaagtttatgaaggatgccaaaaaaaagggggagatgacagcagaggaaaggtctcagtttgaaatcctcaaggcgcagatgtttgctgaacggctagcgaagaggaatcgcagagccaagcgggcccgagcaatgcccgaggaggagccagtgagaggtcctgccaagaagcaaaagcaggggaagaaatctgtatttgatgaagaactcaccaacacaagcaagaaggccctgaaacagtatcgagctggcccttcctttgaagaaaggaaacagttgggcttgccccaccagagacgaggaggaaactttaaatctaaatccagatacaagaggaggaagtagctgtcgtggcctgaagaaattcatgggggcagcccttaaatcccttccctgtgggaagtcatcctggctggtctgtcttttctccatttgtttaaaaaaaaaacaaaaacaaaaaacaacactttggtgtggtggtatggtacgtagctattttcctaagcatgtctgtcaatctcccttcttgctgattagctttcatatgactatattaaatggaagtatttttgggaaaagagaaaccaaaaaaaaaaaaaaaaaa

SEQ ID NO: 2552 - DNA, 3070 bp, Homo sapiens; identical to SEQ ID NO: 2165

SEQ ID NO: 2553 - DNA, 1385 bp, Homo sapiens
tagtaataccagctgtaatcccagctacttgggaggctgaggcagaagaatcgcttgaacccgggaggcggaggttgagcaactacactgcgctgcatcggactcgacgcccgctggtgacgcacacgctgcgccggaagtgtgaactgtctgcctccaggctttgtcatggcggctgctgctgcacgctggaaccatgtgtgggtcggcaccgagactgggatcttgaaaggggtaaatcttcagcgaaaacaggcggcgaacttcacggccggaggacagccgcggcgcgaggaggcagtgagcgccctgtgttggggcaccggcggcgagacccagatgctggtgggctgcgcggacaggacggtgaagcacttcagcaccgaggatggcatattccagggtcagagacactgcccgggcggggagggcatgttccgtggcctcgcccaggccgacggcaccctcatcacatgtgtggattctgggattctcagagtctggcatgacaaggacaaggacacatcctctgacccactcctggaactgagagtgggccctggggtgtgtaggatgcgccaagacccagcacacccccatgtggttgccacaggtgggaaagagaatgctttgaagatatgggacctgcagggctctgaggaacctgtgttcagggccaagaacgtgcggaatgactggctggacttgcgggttcccatctgggaccaggacatacagtttctcccaggatcacagaagcttgtcacctgcacagggtaccaccaggtccgtgtttatgatccagcatccccccagcgccggccagtcctagagaccacctatggagagtacccactaacagccatgaccctcactccgggaggcaactcagtgattgtgggaaacactcatgggcagctggcagaaattgaccttcggcaagggcgtctactgggctgtctgaaggggctggcaggcagtgtgcgtgggttgcagtgccacccttcaaagcctctactagcctcctgtggcttggacagagtcttgaggatacacaggatccagaatccacggggtctggagcataaggtttatctcaagtctcaattgaactgcctcctcttgtcaggcagggacaactgggaggatgagccccaagagcctcaagaacccaacaaggtgcccctagaagacacagagacagatgaactttgggcatccttggaggcagctgccaagcggaagctctcgggtttggagcagccccaaggagctctccaaacgagacggagaaagaagaagcggcctgggtccaccagcccctgacgcccctgtgcccactttgtaaataaactgctgaacacccaaaaaaaaaaaaaaaaaaa

SEQ ID NO: 2554 - DNA, 8629 bp, Homo sapiens
ttttgtcccggaaccccgcagccctccccacactctgggcgcggagcacaatgattggtcactcctattttcgctgagcttttcctcttatttcagttttcttcgagatcaaatctggtttgtagatgtgcttggggagaatgggggcctcttctccaagaagcccggagcctgtcgggccgccggcgcccggtctccccttctgctgcggaggatccctgctggcggttgtggtgctgcttgcgctgccggtggcctggggtcaatgcaatgccccagaatggcttccatttgccaggcctaccaacctaactgatgaatttgagtttcccattgggacatatctgaactatgaatgccgccctggttattccggaagaccgttttctatcatctgcctaaaaaactcagtctggactggtgctaaggacaggtgcagacgtaaatcatgtcgtaatcctccagatcctgtgaatggcatggtgcatgtgatcaaaggcatccagttcggatcccaaattaaatattcttgtactaaaggataccgactcattggttcctcgtctgccacatgcatcatctcaggtgatactgtcatttgggataatgaaacacctatttgtgacagaattccttgtgggctaccccccaccatcaccaatggagatttcattagcaccaacagagagaattttcactatggatcagtggtgacctaccgctgcaatcctggaagcggagggagaaaggtgtttgagcttgtgggtgagccctccatatactgcaccagcaatgacgatcaagtgggcatctggagcggccccgcccctcagtgcattatacctaacaaatgcacgcctccaaatgtggaaaatggaatattggtatctgacaacagaagcttattttccttaaatgaagttgtggagtttaggtgtcagcctggctttgtcatgaaaggaccccgccgtgtgaagtgccaggccctgaacaaatgggagccggagctaccaagctgctccagggtatgtcagccacctccagatgtcctgcatgctgagcgtacccaaagggacaaggacaacttttcacctgggcaggaagtgttctacagctgtgagcccggctacgacctcagaggggctgcgtctatgcgctgcacaccccagggagactggagccctgcagcccccacatgtgaagtgaaatcctgtgatgacttcatgggccaacttcttaatggccgtgtgctatttccagtaaatctccagcttggagcaaaagtggattttgtttgtgatgaaggatttcaattaaaaggcagctctgctagttactgtgtcttggctggaatggaaagcctttggaatagcagtgttccagtgtgtgaacaaatcttttgtccaagtcctccagttattcctaatgggagacacacaggaaaacctctggaagtctttccctttgggaaaacagtaaattacacatgcgacccccacccagacagagggacgagcttcgacctcattggagagagcaccatccgctgcacaagtgaccctcaagggaatggggtttggagcagccctgcccctcgctgtggaattctgggtcactgtcaagccccagatcattttctgtttgccaagttgaaaacccaaaccaatgcatctgactttcccattgggacatctttaaagtacgaatgccgtcctgagtactacgggaggccattctctatcacatgtctagataacctggtctggtcaagtcccaaagatgtctgtaaacgtaaatcatgtaaaactcctccagatccagtgaatggcatggtgcatgtgatcacagacatccaggttggatccagaatcaactattcttgtactacagggcaccgactcattggtcactcatctgctgaatgtatcctctcgggcaatgctgcccattggagcacgaagccgccaatttgtcaacgaattccttgtgggctaccccccaccatcgccaatggagatttcattagcaccaacagagagaattttcactatggatcagtggtgacctaccgctgcaatcctggaagcggagggagaaaggtgtttgagcttgtgggtgagccctccatatactgcaccagcaatgacgatcaagtgggcatctggagcggcccggcccctcagtgcattatacctaacaaatgcacgcctccaaatgtggaaaatggaatattggtatctgacaacagaagcttattttccttaaatgaagttgtggagtttaggtgtcagcctggctttgtcatgaaaggaccccgccgtgtgaagtgccaggccctgaacaaatgggagccggagctaccaagctgctccagggtatgtcagccacctccagatgtcctgcatgctgagcgtacccaaagggacaaggacaacttttcacccgggcaggaagtgttctacagctgtgagcccggctatgacctcagaggggctgcgtctatgcgctgcacaccccagggagactggagccctgcagcccccacatgtgaagtgaaatcctgtgatgacttcatgggccaacttcttaatggccgtgtgctatttccagtaaatctccagcttggagcaaaagtggattttgtttgtgatgaaggatttcaattaaaaggcagctctgctagttattgtgtcttggctggaatggaaagcctttggaatagcagtgttccagtgtgtgaacaaatcttttgtccaagtcctccagttattcctaatgggagacacacaggaaaacctctggaagtctttccctttggaaaagcagtaaattacacatgcgacccccacccagacagagggacgagcttcgacctcattggagagagcaccatccgctgcacaagtgaccctcaagggaatggggtttggagcagccctgcccctcgctgtggaattctgggtcactgtcaagccccagatcattttctgtttgccaagttgaaaacccaaaccaatgcatctgactttcccattgggacatctttaaagtacgaatgccgtcctgagtactacgggaggccattctctatcacatgtctagataacctggtctggtcaagtcccaaagatgtctgtaaacgtaaatcatgtaaaactcctccagatccagtgaatggcatggtgcatgtgatcacagacatccaggttggatccagaatcaactattcttgtactacagggcaccgactcattggtcactcatctgctgaatgtatcctctcaggcaatactgcccattggagcacgaagccgccaatttgtcaacgaattccttgtgggctacccccaaccatcgccaatggagatttcattagcaccaacagagagaattttcactatggatcagtggtgacctaccgctgcaatcttggaagcagagggagaaaggtgtttgagcttgtgggtgagccctccatatactgcaccagcaatgacgatcaagtgggcatctggagcggccccgcccctcagtgcattatacctaacaaatgcacgcctccaaatgtggaaaatggaatattggtatctgacaacagaagcttattttccttaaatgaagttgtggagtttaggtgtcagcctggctttgtcatgaaaggaccccgccgtgtgaagtgccaggccctgaacaaatgggagccagagttaccaagctgctccagggtgtgtcagccgcctccagaaatcctgcatggtgagcataccccaagccatcaggacaacttttcacctgggcaggaagtgttctacagctgtgagcctggctatgacctcagaggggctgcgtctctgcactgcacaccccagggagactggagccctgaagccccgagatgtgcagtgaaatcctgtgatgacttcttgggtcaactccctcatggccgtgtgctatttccacttaatctccagcttggggcaaaggtgtcctttgtctgtgatgaagggtttcgcttaaagggcagttccgttagtcattgtgtcttggttggaatgagaagcctttggaataacagtgttcctgtgtgtgaacatatcttttgtccaaatcctccagctatccttaatgggagacacacaggaactccctctggagatattccctatggaaaagaaatatcttacacatgtgacccccacccagacagagggatgaccttcaacctcattggggagagcaccatccgctgcacaagtgaccctcatgggaatggggtttggagcagccctgcccctcgctgtgaactttctgttcgtgctggtcactgtaaaaccccagagcagtttccatttgccagtcctacgatcccaattaatgactttgagtttccagtcgggacatctttgaattatgaatgccgtcctgggtattttgggaaaatgttctctatctcctgcctagaaaacttggtctggtcaagtgttgaagacaactgtagacgaaaatcatgtggacctccaccagaacccttcaatggaatggtgcatataaacacagatacacagtttggatcaacagttaattattcttgtaatgaagggtttcgactcattggttccccatctactacttgtctcgtctcaggcaataatgtcacatgggataagaaggcacctatttgtgagatcatatcttgtgagccacctccaaccatatccaatggagacttctacagcaacaatagaacatcttttcacaatggaacggtggtaacttaccagtgccacactggaccagatggagaacagctgtttgagcttgtgggagaacggtcaatatattgcaccagcaaagatgatcaagttggtgtttggagcagccctccccctcggtgtatttctactaataaatgcacagctccagaagttgaaaatgcaattagagtaccaggaaacaggagtttctttaccctcactgagatcatcagatttagatgtcagcccgggtttgtcatggtagggtcccacactgtgcagtgccagaccaatggcagatgggggcccaagctgccacactgctccagggtgtgtcagccgcctccagaaatcctgcatggtgagcataccctaagccatcaggacaacttttcacctgggcaggaagtgttctacagctgtgagcccagctatgacctcagaggggctgcgtctctgcactgcacgccccagggagactggagccctgaagcccctagatgtacagtgaaatcctgtgatgacttcctgggccaactccctcatggccgtgtgctacttccacttaatctccagcttggggcaaaggtgtcctttgtttgcgatgaagggttccgattaaaaggcaggtctgctagtcattgtgtcttggctggaatgaaagccctttggaatagcagtgttccagtgtgtgaacaaatcttttgtccaaatcctccagctatccttaatgggagacacacaggaactccctttggagatattccctatggaaaagaaatatcttacgcatgcgacacccacccagacagagggatgaccttcaacctcattggggagagctccatccgctgcacaagtgaccctcaagggaatggggtttggagcagccctgcccctcgctgtgaactttctgttcctgctgcctgcccacatccacccaagatccaaaacgggcattacattggaggacacgtatctctatatcttcctgggatgacaatcagctacatttgtgaccccggctacctgttagtgggaaagggcttcattttctgtacagaccagggaatctggagccaattggatcattattgcaaagaagtaaattgtagcttcccactgtttatgaatggaatctcgaaggagttagaaatgaaaaaagtatatcactatggagattatgtgactttgaagtgtgaagatgggtatactctggaaggcagtccctggagccagtgccaggcggatgacagatgggaccctcctctggccaaatgtacctctcgtacacatgatgctctcatagttggcactttatctggtacgatcttctttattttactcatcattttcctctcttggataattctaaagcacagaaaaggcaataatgcacatgaaaaccctaaagaagtggctatccatttacattctcaaggaggcagcagcgttcatccccgaactctgcaaacaaatgaagaaaatagcagggtccttccttgacaaagtactatacagctgaagaacatctcgaatacaattttggtgggaaaggagccaattgatttcaacagaatcagatctgagcttcataaagtctttgaagtgacttcacagagacgcagacatgtgcacttgaagatgctgccccttccctggtacctagcaaagctcctgcctctttgtgtgcgtcactgtgaaacccccacccttctgcctcgtgctaaacgcacacagtatctagtcaggggaaaagactgcatttaggagatagaaaatagtttggattacttaaaggaataaggtgttgcctggaatttctggtttgtaaggtggtcactgttcttttttaaaatatttgtaatatggaatgggctcagtaagaagagcttggaaaatgcagaaagttatgaaaaataagtcacttataattatgctacctactgataaccactcctaatattttgattcattttctgcctatcttctttcacatatgtgtttttttacatacgtacttttcccccttagtttgtttccttttattttatagagcagaaccctagtcttttaaacagtttagagtgaaatatatgctatatcagtttttactttctctagggagaaaaattaatttactagaaaggcatgaaatgatcatgggaagagtggttaagactactgaagagaaatatttggaaaataagatttcgatatcttctttttttttgagatggagtctggctctgtctcccaggctggagtgcagtggcgtaatctcggctcactgcaagctccgcctcccgggttgacaccattttcctgcctcagcctcctgagtagttgggattaccagtagatgggactacaggcacctgccaacacgcccggctaatttttttgtatttttagtagagacggggtttcaccatgttagccaggatggtctggatctcctgacctcgtgatccacctgcctcggcctcccaaagtgctgcgattacaggcatgagccaccgcgcctggccgctttcgatattttctaaactttaattcaaaagcactttgtgctgtgttctatataaaaaacataataaaaattgaaatgaaagaataattgttattataaaagtactagcttacttttgtatggattcagaatatactaaattaactttttaaaacacaacttttaaaaaatgtatcaaaataataaacgtgttctgatatttttaaaataagtgaccttgtgttctttaaccagtccacatctttagagaacaaaaatgtgttatgatattatgggccatgctaatgacctctagaaaacatcagaatatttctggatatttaataatagctttatatatgactaatgctcatttctatgtaattctgtttaatagttgctttaaaggtgaattttgccacatttactttgacagcagtataaggagtgagatagacatgaacctgaatttcaatttaaaatcatggaagagagggaaaaaaaaccagcttaagaaaaatcaactgataaactgcaagaaaaaaatgcaacttacatcacaaaagctaattgctttattatttagagagtacttaaaaattaaagaccaaacttctctccacccaacaaaaatgggcaaaggacatacagctaggtcaccaagaaagaagggcaaataggtggtgagtatatgtaaagatacttgataggacttttgcttagttgaatctttagcaaatctcttttatttcttgggattttgaagaagtaatttttaaaggaggactagaaactaagtgattgggaattggcctttttagaattaaaatttcccattacaagaaaaaaaaatcctgtgttcttttttttttccagaatggagtaggtcagtgagcaatgtgattaataaatatttcaatgtctgtgacttttgatttattttggagacagggtcttgctctgttacccaggctggagtgcagtggtgctatctaggcttactgcaacctcacctgtcactttttaattgcaagaaagctgaaaggtttttttctattatatcagttataatgataaatactgtatatactaactatgagtaaaatactatattgcctaacttgtattattaagcaattctgctaacctgtgaccttacattttcatctgaaaagcaggggctggacaccaattgccctatgaagctattgctagtcctaacattctttgttttgtttgcttttttggcacacttaagtgtgtactatgaagtttatgatgctttaatgaaattttctgtctctaccattgtaatgagaaaggaataaaatactttattttgcaaatctaaaaaaaaaaaaaa

SEQ ID NO: 2555 - DNA, 1582 bp, Homo sapiens; identical to SEQ ID NO: 342

SEQ ID NO: 2556 - DNA, 4812 bp, Homo sapiens
gcgctccagacaagatggcgcggccggtccggggagggctcggggccccgcgccgctcgccttgccttctccttctctggctgcttttgcttcggctggagccggtgaccgccgcggccggcccgcgggcgccctgcgcggccgcctgcacttgcgctggggactcgctggactgcggtgggcgcgggctggctgcgttgcccggggacctgccctcctggacgcggagcctaaacctgagttacaacaaactctctgagattgaccctgctggttttgaggacttgccgaacctacaggaagtgtacctcaataataatgagttgacagcggtaccatccctgggcgctgcttcatcacatgtcgtctctctctttctgcagcacaacaagattcgcagcgtggaggggagccagctgaaggcctacctttccttagaagtgttagatctgagtttgaacaacatcacggaagtgcggaacacctgctttccacacggaccgcctataaaggagctcaacctggcaggcaatcggattggcaccctggagttgggagcatttgatggtctgtcacggtcgctgctaactcttcgcctgagcaaaaacaggatcacccagcttcctgtaagagcattcaagctacccaggctgacacaactggacctcaatcggaacaggattcggctgatagagggcctcaccttccaggggctcaacagcttggaggtgctgaagcttcagcgaaacaacatcagcaaactgacagatggggccttctggggactgtccaagatgcatgtgctgcacctggagtacaacagcctggtagaagtgaacagcggctcgctctacggcctcacggccctgcatcagctccacctcagcaacaattccatcgctcgcattcaccgcaagggctggagcttctgccagaagctgcatgagttggtcctgtccttcaacaacctgacacggctggacgaggagagcctggccgagctgagcagcctgagtgtcctgcgtctcagccacaattccatcagccacattgcggagggtgccttcaagggactcaggagcctgcgagtcttggatctggaccataacgagatttcgggcacaatagaggacacgagcggcgccttctcagggctcgacagcctcagcaagctgactctgtttggaaacaagatcaagtctgtggctaagagagcattctcggggctggaaggcctggagcacctgaaccttggagggaatgcgatcagatctgtccagtttgatgcctttgtgaagatgaagaatcttaaagagctccatatcagcagcgacagcttcctgtgtgactgccagctgaagtggctgcccccgtggctaattggcaggatgctgcaggcctttgtgacagccacctgtgcccacccagaatcactgaagggtcagagcattttctctgtgccaccagagagtttcgtgtgcgatgacttcctgaagccacagatcatcacccagccagaaaccaccatggctatggtgggcaaggacatccggtttacatgctcagcagccagcagcagcagctcccccatgacctttgcctggaagaaagacaatgaagtcctgaccaatgcagacatggagaactttgtccacgtccacgcgcaggacggggaagtgatggagtacaccaccatcctgcacctccgtcaggtcactttcgggcacgagggccgctaccaatgtgtcatcaccaaccactttggctccacctattcacataaggccaggctcaccgtgaatgtgttgccatcattcaccaaaacgccccacgacataaccatccggaccaccaccatggcccgcctcgaatgtgctgccacaggtcacccaaaccctcagattgcctggcagaaggatggaggcacggatttccccgctgcccgtgagcgacgcatgcatgtcatgccggatgacgacgtgtttttcatcactgatgtgaaaatagatgacgcaggggtttacagctgtactgctcagaactcagccggttctatttcagctaatgccaccctgactgtcctagagaccccatccttggtggtccccttggaagaccgtgtggtatctgtgggagaaacagtggccctccaatgcaaagccacggggaaccctccgccccgcatcacctggttcaagggggaccgcccgctgagcctcactgagcggcaccacttgacccctgacaaccagctcctggtggttcagaacgtggtggcagaggatgcgggccgatatacctgtgagatgtccaacaccctgggcacggagcgagctcacagccagctgagcgtcctgcccgcagcaggctgcaggaaggatgggaccacggtaggcatcttcaccattgctgtcgtgagcagcatcgtcctgacgtcactggtctgggtgtgcatcatctaccagaccaggaagaagagtgaagagtacagtgtcaccaacacagatgaaaccgtcgtgccaccagatgttccaagctacctctcttctcaggggaccctttctgaccgacaagaaaccgtggtcaggaccgagggtggccctcaggccaatgggcacattgagagcaatggtgtgtgtccaagagatgcaagccactttccagagcccgacactcacagcgttgcctgcaggcagccaaagctctgtgctgggtctgcgtatcacaaagagccgtggaaagcgatggagaaagctgaagggacacctgggccacataagatggaacacggtggccgggtcgtatgcagtgactgcaacaccgaagtggactgttactccaggggacaagccttccacccccagcctgtgtccagagacagcgcacagccaagtgcgccaaatggcccggagccgggtgggagtgaccaagagcattctccacatcaccagtgcagcaggactgccgctgggtcctgccccgagtgccaagggtcgctctaccccagtaaccacgatagaatgctgacggctgtgaagaaaaagccaatggcatctctagatgggaaaggggattcttcctggactttagcaaggttgtatcacccggactccacagagctacagcctgcatcttcattaacttcaggcagtccagagcgcgcggaagcccagtacttgcttgtttccaatggccacctccccaaagcatgtgacgccagtcccgagtccacgccactgacaggacagctccccgggaaacagagggtgccactgctgttggcaccaaaaagctaggttttgtctacctcagttcttgtcataccaatctctacgggaaagagaggtaggagaggctgcgaggaagcttgggttcaagcgtcactcatctgtacatagttgtaactcccatgtggagtatcagtcgctcacaggacttggatctgaagcacagtaaacgcaagaggggatttgtgtacaaaaggcaaaaaaagtatttgatatcattgtacataagagttttcagagatttcatatatatcttttacagaggctattttaatctttagtgcatggttaacagaaaaaaattatacaattttgacaatattatttttcgtatcaggttgctgtttaattttggagggggtggggaaatagttctggtgccttaacgcatggctggaatttatagaggctacaaccacatttgttcacaggagtttttggtgcggggtgggaaggatggaaggccttggatttatattgcacttcatagacccctaggctgctgtgcggtgggactccacatgcgccggaaggagcttcaggtgagcactgctcatgtgtggatgcccctgcaacaggcttccctgtctgtagagccaggggtgcaagtgccatccacacttgcagtgaatggcttttccttttaggtttaagtcctgtctgtctgtaaggcgtagaatctgtccgtctgtaaggcgtagaatgagggttgttaatccatcacaagcaaaaggtcagaacagttaaacactgcctttcctcctcctcttattttatgataaaagcaaatgtggccttctcagtatcattcgattgctatttgagacttttaaattaaggtaaaggctgctggtgttggtacctgtggatttttctatactgatgttttcgttttgccaatataatgagtattacattggccttgggggacagaaaggaggaagttctgacttttcagggctaccttatttctactaaggacccagagcaggcctgtccatgccattccttcgcacagatgaaactgagctgggactggaaaggacagcccttgacctgggttctgggtataatttgcacttttgagactggtagctaaccatcttatgagtgccaatgtgtcatttagtaaaacttaaatagaaacaaggtccttcaaatgttcctttggccaaaagctgaagggagttactgagaaaatagttaacaattactgtcaggtgtcatcactgttcaaaaggtaagcacatttagaattttgttcttgacagttaactgactaatcttacttccacaaaatatgtgaatttgctgcttctgagaggcaatgtgaaagagggagtattacttttatgtacaaagttatttatttatagaaattttggtacagtgtacattgaaaaccatgtaaaatattgaagtgtctaacaaatggcattgaagtgtctttaataaaggttcatttataaatgtcaaaaaaaaaaaaaaaaaaaaaaaaaaaaaaaaaaaaaaaaaaaaaaaaaaa

SEQ ID NO: 2557 - DNA, 8332 bp, Homo sapiens; identical to SEQ ID NO: 1505

SEQ ID NO: 2558 - DNA, 1348 bp, Homo sapiens; identical to SEQ ID NO: 2287

SEQ ID NO: 2559 - DNA, 555 bp, Homo sapiens
atggataaactaacctatgcctttgaaaataaacccttacataagagtgaaaagaggaccaccaaggagtcatggctgagctggctttttcttgtggctattttaaaaggtgtccagtgtgaggtgcagctggtggagtctgggggaggcttggtaaagcctggggggtccctgagactctcctgtgcagcctctggattcaccttcagtgactactacatgaactgggtccgccaggctccagggaaggggctggagtgggtctcatccattagtagtagtagtaccatatactacgcagactctgtgaagggccgattcaccatctccagagacaacgccaagaactcactgtatctgcaaatgaacagcctgagagccgaggacacggctgtgtattactgtgcgagagacacagtgaggggaagtcagtgtgagcccagacacaaacctccctgcaggggtccccaggaccaccagggggcgcccgggacactgtgcacggggctgtctccagggcaggtgcagtctctgaagaagaaacatttgtcgtaa

SEQ ID NO: 2560 - DNA, 1639 bp, Homo sapiens
agctgcgggggcgcagtcgccgggccgcgggcggcgggacggacgaggccggggccccgggtggcacccggcaggcgggcaggcgggcgccatggagctgctctcggcgctgagcctgggcgaactggcgctcagcttctcgcgggtgccgctcttccccgtcttcgacctcagttacttcatcgtctccatcctctacctcaagtatgagccaggagcagtcgaactgtcccggcgccaccccatcgcgtcctggctgtgcgccatgctgcattgcttcgggagctacatcctggctgatctgctccttggggagccactgatcgattacttcagcaacaactccagcatcctgctggcctcagctgtctggtacttgattttcttctgccccctggacctcttctacaagtgtgtctgcttcctgcctgtgaaactcatcttcgtggccatgaaggaggtggtgcgagtccgcaagatcgcggtgggcatccatcacgcccatcaccactaccaccacgggtggttcgtcatgattgcaactgggtgggtcaaaggttctggtgtcgccctcatgtccaactttgagcagctgctccgaggggtctggaagccagagaccaacgagatcctgcacatgtctttccccaccaaggccagcctgtatggagccatcctcttcaccctccagcagacccgctggctcccagtgtccaaagccagcctcatcttcatcttcaccttgttcatggtgtcctgtaaggtgtttctgacagccacccactcacacagctccccctttgatgccctggagggctacatctgccccgtgctgtttggttcggcctgcgggggtgaccatcaccacgacaaccatggtgggtcccacagcggtggtgggccaggagctcagcattcggccatgcccgccaagtccaaggaggagttgagcgagggctccaggaagaagaaggccaagaaggcggattagggggtggcccaaggggcaccggggagaggacccggacccaggaccctctgagctgggaggcttcctgcgctcagacctatcctttcctggccttgacttccccatctgcaaatcagggtcattggctcaccctccagggctgacgtgggggttgagatatggggatgaggatgaagaacttttgtagaaatcggggttccctctttctctctgccaggaccccatagagtcacagcttttggaggggttcacagaatcctggcagcagctccagtcaagaatgtcactggttggcatgatattcttagttctatttttccttctttaaaattgcatcttgaccaggcacagtggctcatgcctataatcctagcactttgggaggccgaggcgggcagatcacctgaggtcaggagttcaagaccagcttggccaacatggtgaaaccccatctctaccaaaaatacaaaaattagccagacgtggtggtgcacgcctttaatcccagctactcgggaggctgaggcaggagaatcacatgaatccaggaggtggaggttgcagtgagctgagatcttcccactgcactccagcctggccaataagacctgtctccagcaagaccctgtctcaaaaaaaaaaaaaaaa

SEQ ID NO: 2561 - DNA, 1973 bp, Homo sapiens; identical to SEQ ID NO: 2332

SEQ ID NO: 2562 - DNA, 4380 bp, Homo sapiens
atcgtggggcgggggtggggcgggactgagggcggagtgtgagcgggctcggttttgggccgcggcgggagcgggagtcgccgccactcgagtgcgcaggcgcctggcgattaccggtctcaccatggagcggaaagtgcttgcgctccaggcccgaaagaaaaggaccaaggccaagaaggacaaagcccaaaggaaatctgaaactcagcaccgaggctctgctccccactctgagagtgatctaccagagcaggaagaggagattctgggatctgatgatgatgagcaagaagatcctaatgattattgtaaaggaggttatcatcttgtgaaaattggagatctattcaatgggagataccatgtgatccgaaagttaggctggggacacttttcaacagtatggttatcatgggatattcaggggaagaaatttgtggcaatgaaagtagttaaaagtgctgaacattacactgaaacagcactagatgaaatccggttgctgaagtcagttcgcaattcagaccctaatgatccaaatagagaaatggttgttcaactactagatgactttaaaatatcaggagttaatggaacacatatctgcatggtatttgaagttttggggcatcatctgctcaagtggatcatcaaatccaattatcaggggcttccactgccttgtgtcaaaaaaattattcagcaagtgttacagggtcttgattatttacataccaagtgccgtatcatccacactgacattaaaccagagaacatcttattgtcagtgaatgagcagtacattcggaggctggctgcagaagcaacagaatggcagcgatctggagctcctccgccttccggatctgcagtcagtactgctccccagcctaaaccagctgacaaaatgtcaaagaataagaagaagaaattgaagaagaagcagaagcgccaggcagaattactagagaagcgaatgcaggaaattgaggaaatggagaaagagtcgggccctgggcaaaaaagaccaaacaagcaagaagaatcagagagtcctgttgaaagacccttgaaagagaacccacctaataaaatgacccaagaaaaacttgaagagtcaagtaccattggccaggatcaaacgcttatggaacgtgatacagagggtggtgcagcagaaattaattgcaatggagtgattgaagtcattaattatactcagaacagtaataatgaaacattgagacataaagaggatctacataatgctaatgactgtgatgtccaaaatttgaatcaggaatctagtttcctaagctcccaaaatggagacagcagcacatctcaagaaacagactcttgtacacctataacatctgaggtgtcagacaccatggtgtgccagtcttcctcaactgtaggtcagtcattcagtgaacaacacattagccaacttcaagaaagcattcgggcagagataccctgtgaagatgaacaagagcaagaacataacggaccactggacaacaaaggaaaatccacggctggaaattttcttgttaatccccttgagccaaaaaatgcagaaaagctcaaggtgaagattgctgaccttggaaatgcttgttgggtgcacaaacatttcactgaagatattcaaacaaggcaatatcgttccttggaagttctaatcggatctggctataatacccctgctgacatttggagcacggcatgcatggcctttgaactggccacaggtgactatttgtttgaacctcattcaggggaagagtacactcgagatgaagatcacattgcattgatcatagaacttctggggaaggtgcctcgcaagctcattgtggcaggaaaatattccaaggaatttttcaccaaaaaaggtgacctgaaacatatcacgaagctgaaaccttggggcctttttgaggttctagtggagaagtatgagtggtcgcaggaagaggcagctggcttcacagatttcttactgcccatgttggagctgatccctgagaagagagccactgccgccgagtgtctccggcacccttggcttaactcctaagcccctgcccagcaccacagcagagatcacacactgaccctccgcccttccccttcaagcattttcctcttcccttttcagggtgaagctcttccttcaagagtttctagatcttgttttttttttaatccaacatgttcatttgggtttgcttacttgaccctgtggagatccccacagccattgggcatcctaggtgaatttggccttggttgggctctgccaaagactaatggactaaaatgtgaaacagcctcttgccctgtacctttccttcccattaggacatcctttaaattataagcatcctttttgaaaagagctatgaaggtgtatgagcccatccttttattcattgactctaagagtcaaattttctagtgcatatcctattgccagcataaggatgaggagggggaaagggtcttaattctatgtacagcagagacattaaacttgctgtgtccgggctgcatcatcttcctggactgtttctgttgttctctgtgttcacattttttcctgcaacttttaagctactgtcttttttaaatagctatatgaacaccaaatttgggtaccattttatcactgttcaaagcactgtcaaattcctttcatcctttaatagttaagatctttgaatcttcagtctgatttttaatgtaagcaaaaacagaaccattgaatagtaatttcttgagaacctcaggtgttctataaacagtcctttcctgtatgtcttctattaccctaagaccagagttattttggttggttgttttgttttattttttgtttttgtatccatggctggcactttactcattgcacttgagtttattgccccataactaaaggatcaggatgatggtagaacggagatctgggtttcagagctttcccatttaagaaaaatagatcttgagattctgattcttttccaaacagtcccctgctttcatgtacagctttttctttaccttacccaaaattctggccttgaagcagttttcctctatggctttgcctttctgattttctcagaggctcgagtctttaatataaccccaaatgaaagaaccaaggggaggggtgggatggcacttttttttgttggtcttgttttgttttgttttttggttggttggttcgttattttttaagattagccattctctgctgctatttccctacataatgtcaatttttaaccataattttgacatgattgagatgtacttgaggcttttttgttttaattgagaaaagactttgcaattttttttttaggatgagcctctcctagacttgacctagaatattacatattcctccagtaagtaatactgaagagcaaaagagaggcaggattggggtcacagccgcttcttcagcatggaccaagtgggccttggggattgcagcgttctcgaagtggctgtaggactcgaatttacagaaagccacagaggtgcaacttgaggctctgctagcaagccaccagtgaggctattgggtaaccacctttctatacaggagattggaatctactttgtcatttatccaccacagtgacaaaggaaaagtggtgccgttatgcaatccatttaactcataaacatattactctgagtaactggccagccattcatcggatccttcattgggtactcctgaaatcagacatgttcctgtagaaagaattttaagttaggctttctatgcacctatcaagaatcaagagaatagattgtatcaaacaacggcagggaaatccttcagcaattctaatccactttgggttttcagctgtttttacatctaaagcaatagactagaactgaattatcttctacatagtaaaatcacaattgtggaattacaggaattctggtgatattaaggtgaaataacaaaacacaaaaggccctattttaacagttgatgtgacagtaagttttaatagaacctgtaacttcattttggaaatgcttctccaccaaataagggctttttcccctatttaaggagccagatggattgaaagatgtggaaataggcagctgtagatcttgatcttccaggtaccccatgtacctttattgagcttaattataatactgtcaaattgccacgatctcactaaaggatttctatttgctgtcagttaaaaataaagccctaaatacatttttattctttctactgagggcattgtctgttttctttgtaaatgccgtacaataaacaaattatttaataacctaaaaaaaaaaaaaaaaaaa

SEQ ID NO: 2563 - DNA, 3143 bp, Homo sapiens
ctcgaggtaacctttggtggcgggaagagttcggaagttttcgcgccggggtggagtcatcctgggaacctccacgcgactttggtggaggtagttctttggcagcgggcatggcgggtaccgtggtgctggacgatgtggagctgcgggaggctcagagagattacctggacttcctggacgacgaggaagaccagggaatttatcagagcaaagttcgggagctgatcagtgacaaccaataccggctgattgtcaatgtgaatgacctgcgcaggaaaaacgagaagagggctaaccggcttctgaacaatgcctttgaggagctggttgccttccagcgggccttaaaggattttgtggcctccattgatgctacctatgccaagcagtatgaggagttctacgtaggactggaaggcagctttggctccaagcacgtctccccgcggactcttacctcctgcttcctcagctgtgtggtctgtgtggagggcattgtcactaaatgttctctagttcgtcccaaagtcgtccgcagtgtccactactgtcctgctactaagaagaccatagagcgacgttattctgatctcaccaccctggtggcctttccctccagctctgtctatcctaccaaggatgaggagaacaatccccttgagacagaatatggcctttctgtctacaaggatcaccagaccatcaccatccaggagatgccggagaaggccccagccggccagctcccccgctctgtggacgtcattctggatgatgacttggtggataaagcgaagcctggtgaccgggttcaggtggtgggaacctaccgttgccttcctggaaagaagggaggctacacctctgggaccttcaggactgtcctgattgcctgtaatgttaagcagatgagcaaggatgctcagccctctttctctgctgaggatatagccaagatcaagaagttcagtaaaacccgatccaaggatatctttgaccagctggccaagtcattggccccaagtatccatgggcatgactatgtcaagaaagcaatcctctgcttgctcttgggaggggtggaacgagacctagaaaatggcagccacatccgtggggacatcaatattcttctaataggagacccatccgttgccaagtctcagcttctgcggtatgtgctttgcactgcaccccgagctatccccaccactggccggggctcctctggagtgggtctgacggctgctgtcaccacagaccaggaaacaggagagcgccgtctggaagcaggggccatggtcctggctgaccgaggcgtggtttgcattgatgaatttgacaaaatgtctgacatggatcgcacagccatccatgaagtgatggagcagggtcgagtgaccattgccaaggctggcatccatgctcggctgaatgcccgctgcagtgttttggcagctgccaaccctgtctacggcaggtatgaccagtataagactccaatggagaacattgggctacaggactcactgctgtcacgatttgacttgctcttcatcatgctggatcagatggatcctgagcaggatcgggagatctcagaccatgtccttcggatgcaccgttacagagcacctggggagcaggatggcgatgctatgcccttgggtagtgctgtggatatcctggccacagatgatcccaactttagccaggaagatcagcaggacacccagatttatgagaagcatgacaaccttctacatgggaccaagaagaaaaaggagaagatggtgagtgcagcattcatgaagaagtacatccatgtggccaaaatcatcaagcctgtcctgacacaggagtcggccacctacattgcagaagagtattcacgcctgcgcagccaggatagcatgagctcagacaccgccaggacatctccagttacagcccgaacactggaaactctgattcgactggccacagcccatgcgaaggcccgcatgagcaagactgtggacctgcaggatgcagaggaagctgtggagttggtccagtatgcttactttaagaaggttctggagaaggagaagaaacgtaagaagcgaagtgaggatgaatcagagacagaagatgaagaggagaaaagccaagaggaccaggagcagaagaggaagagaaggaagactcgccagccagatgccaaagatggggattcatacgacccctatgacttcagtgacacagaggaggaaatgcctcaagtacacactccaaagacggcagactcacaggagaccaaggaatcccagaaagtggagttgagtgaatccaggttgaaggcattcaaggtggccctcttggatgtgttccgggaagctcatgcgcagtcaatcggcatgaatcgcctcacagaatccatcaaccgggacagcgaagagcccttctcttcagttgagatccaggctgctctgagcaagatgcaggatgacaatcaggtcatggtgtctgagggcatcatcttcctcatctgaggaggcctcgtctctgaacttgggttgtgccgagagagtttgttctgtgtttcccaccctctccctgacccaagtctttgcctctactcccttaacagtgttgaattcaactgaaggcgaggaatgttggtgatgaagctgagttcaggactcggtggaccctttgggaatgggtcatgaaagctgccatggggtgaggaaagaggagacagtgggagaggacaatgactattgcatcttcattgcaaaagcactggctcatccgccctacttcccatcccacacaaacccaattgtaaataacatatgacttctgagtacttttgggggcacaactgttttctgtttgctgtttttttgttttgttttttttctccagagcactttggtctagactaggctttgggtggttccaattggtggagagaagctctgaggcacgtcatgcaggtcaagaaagctttctttgcagtagcaccagttaaggtgaatatgtattgtatcacaaaacaaacccaatatccagatgaatatccgagatgttgaataaacttagccatttcgtacacatggtaaaaaaaaaaaaaaaaaaaaaaaaaaaaaaaa

SEQ ID NO: 2564 - DNA, 5679 bp, Homo sapiens
atcgccccgcccacacgccgcctgccaggcgtgagtcttcctcccgctctgcgccgtcgccccgcccacacgccgccaccctcgcgtcagttgtcgctccgcgcctgcgcccgttgtctccctgctcgctccgggtcccggcgccgcgccatgtgggctgcggcgggcgggctgtggcgctcccgcgcgggtctccgggccctgttccgtagccgcgatgctgcgctatttccaggctgcgagcggggacttcactgctctgctgtctcctgcaagaactggctcaagaaatttgcctcgaaaaccaaaaaaaaggtttggtatgaaagtccttccttgggttctcactcgacttacaaaccatccaagttggaattcctcatgaggagcacctcaaagaaaaccaggaaggaagaccatgcgcgcctgagggccctgaacggcctcctctataaggcactgacagacctgctgtgtacccctgaagtgagtcaggagctgtatgaccttaacgtggagctctccaaggtttccctgactccagacttctcagcctgccgagcgtactggaagacaacgctctctgctgagcagaacgcacacatggaggctgtcctgcagagaagtgccgcgcacatgaggcaccttttgatgtcccagcagaccctgaggaatgtgccaccgatagtgtttgttcaagacaagggaaatgcagctctagctgagcttgatcagttactggcagtcgcagactttggaccccgggatgaaagagacaactttgtacaaaatgatttcagggaccctgatgccccacaaccctgcggcaccacagagccgaccacaagctccagtctgtgtgggatcgatcatgaggcgctcaacaagcagattatggagtacaaaaggaggaaagataaagggctcgggggcctggtgtggcaggggcaggtggctgagctgacaacgcagatgaaaaagggaaggaagagggccaagccccgcctggagcaggacagctccctcaagagttacctgtcaggcgaggaggttgaagatgacctggacctggttggtgccccggagtacgaatgctatgccccggacacagaggagttggaggcagagagaggaggtggcagaacagaggatggccacagctgcggagcaagcagggagtagatggagaggctctgcccatcccacatttgcagggaaaagcattggcacgcaacgcagcatgtggcttcattgaggcagttgatggagttaaaccatctgctcttctgctacttcaacattttctagcttttccgtgtatctaaacacaatttgctacacaagtcactgtttttttttccatgcactgtgtgtaatttaaaaattaaatggccatcttatcacagattctcacaaaaagaaaatggtaaaatagtgtctctgagatgctggcatggccacctccacctgcagagccctgccaggtgccagtgagtgcttggcccgaggggtcaggccacagcagtggccggggtaagaactgaacctgcaaacctggggagaacagagggtccccagagcctcccaaccccctggagctgggctccgtccctggggctgctgggctggcacgtggcgccgggggctccatccctggggctgctgggtcggcacgtggcgccgggggctccgtccctgactggcctcttcacagctttgtgcagcaggctccaccttctggttcaggccaaggttgggcagaaagtgagttgggtttgctggggcttcctgggcgaccccggctctgaccgtggttccatcacgcctgaagtagtaacacttttcccttggtgcccgtggccagctagtgtattttctaatccatccaaaggtgaaacagacttggtctttgccttctgaagagtgtgcgactctgagtcatactgaattctttgtgtcacctccgacgcaaagattcgttttgctgtttatcagaagagaaaacacagattccataccttgtcagctcctatttagttcggcttccctcttaatgtcccagcccctgtgagctgtcaggttctaaattcagaattctctcaattctgtcaggttctgcactacgagtcagtgtcatccctccaagccctggctctctgccagtgcagcagggctgtgagaatcaagacggcacagggaaggcatctgtcccagcatttgcacatgacaggtgcccacggtgcaggagtagaatctgtggaagcagcagtggctttagttgctgtgccctgccacctcctccccaaaaaggagaagtgtccaagggatagcagacccgtagcactgagcggcctgccgtgctgaccactggatccaggccacgtgctgcagacagcggctgtgggcgagtgatgaggccactacccagaaagctgcatgtgcactgtgtggggtaaggacagtaggagatgctgctgcaagatgctgactcccttgtttttcttttcatttgtgctctgggactaagctgtgtataagtcatcaaatggcagaagcaagatttttcttttgagatctaggaaattatttgtttatactctacactcttatttcctatatcaggatggggaggccactacctcaggccagttaaactaagaagaaagaatttaaggcaatttgtaaggatagacaaaaccccacatgatggtatgagtaggagagagaaaaaaaaaagggagccagaaattaggttacaaagtgtacaccacacataaaggctgatgcctctgttacaccgtgagccaaatgtttatctctagggtttctggtagccagttgcggggtgtccagtgaaggggtgtacatgtctgtggttaatcatataggtcaggataatgaggtgatactgcagtgacaaatggcaaatctccctggcttacaacaaccagtttgcctcttattcttctaggggaccatcatgggctgaggtcaggccaaggccttttgtatctggtgttactggaacatggctatgtgaattcatttatgtacaagagacctccccatcctgatgtaggaaatgaatggtgatgatttacgagcgcaacatcctaaaaaacgtttttgtatttccctagcaagataacttcaggttacaaggctctggtacttgaccatgatgactccatgagaaaacagcagaacgccagctttgcaggtacctccacagcactgccgggctgggaacagggccagtgcttgcaccagcgctggagggggccacagcagagtaaagacagagtctgccatgcaggagtgcttcgcaggtcaggcactgctctgagtgctttgtgttaacctgccccccgccccctaacttgggaaaggtgttaaagaaggagagaacgccctcaatggtgtgtcctttgcatacacacctttgcatgcatctgatgtgcccaggctgtgttttattgttctagcaatttattgttacaaaacagattgctgccatcaatttgtctcaggtccttctagcacatctgacagggactagtgtctagagccatgaggacagagaccagaagggacaagaaggagtgggcagagggaatggaaggtagagttaggcccagagagccccaggctgctgcccagacctccacgcctgtgccggatgtggtgttggcatccatagcagtctcgcaaagttgttctcattttccaaataaggaatctgaggcccagggagaggtgaagtgctgcaggagatccaaccaggcgccggctcagtgcctcctagaaagaggagtgtgggcacgtttgcaggggatccaaccaggcgtcagctcagtgcctcctagaaagtggagtgtgggcatgtttgcaggggatccaaccaggcgtcggctcagtgcctcctagaaagtggagtgtgggcacgtttgcaggggatccaaccaggcgtctgctcagtgcctcctagaaagtggagtgtgggcacgtttgtaggggatcccaccaggcatcagctcagtgcctcctagaaagaggagtgtgggcacgtttcagagaaaactggcttaggcctccctgtttctggcgtggccttccctgggagcgagttagggacacggaagctcacccgcttctgaatgggtccactcctggggatttccgcggccttccctgggagcgggttagggacacggaagctcacccccttctgaatgggtccactcctggggatttccgcggccttccctgggagcgggttagggacatggaagctcaccctcttctgaatgggtccactcctggggatttccacggcctttcctgggagcaggttagggacatggaagctcacgcccttctgaatgggtccactcccggggatttccatggccttccctggatgatccactcctggggattttccgcagctctccagatgacgtgcacgcacactaaacacccagaagttagggaggcactgatccagtgaagtcctcagatcaaccttgtgagctttttacaagtacctgtcactgttaaactgctgatgaaatgtgaaacgacttcacaggttttcagtctgataagctctcctgtgtcactgtcccttaccttgttagtaaaggtcaatggttctcaaagttccgggcacatcccctgggggctcataaaaccagactgtcggccacttcagccttctggttcgctgttccttggtaatgcagatggcccagtaagcaactctacaaacattagaacattttgaggtagacaggggaacttaatcaccccttgtaggcccccagaagactggacccaacatccagcacaatgcctctcagccttggctgtgcatctgaaacacctgctgtttgaagacacctgggcctggagacgggccagagccaccttggtggtctgagtatgaggccagcattagaacctctgctctacgggtgactgccctgggttgatttttttccagtattatctttagtacagaatcttttcctctctaagggcctgagaccctctcttaggaatagaagtacagttttcttccccactccttttgtccagaaggaaaacctggttttacatcagaaacttgaggtactttgaaaatttgccagctgccttgaaggagagagggcttgagtgtattttgggggaagaatgaggggacaacagggcagggagaagggacagagctagaggaaggacaggcctgtgccacccaggccagggtaaggggagcagagaccttttggttcctggtttgtgacacaggaagggagggaactggggaggacaggtcatgatcagtgtttcctgattaaaaattttttatttttatttttaattatcatgggcacagagtaggtgtatatatttgtggggtacatgagatgttttgatacagacatgcaatgtgaaaaagcacatcatggagactggggcacccatcccctcaagcatttatcctttgtgccacaaacaatccgattatattgttttagttatttttaaatatgcaattaaattgttattgactatagtcacccttctgtgctgctgctctactgtggcctcaaagatcataaatgctgtgggtgctggcaagatactgaaataaattaattctgtatttctaaaaat

SEQ ID NO: 2565 - DNA, 534 bp, Homo sapiens
cgactttcccgatcgccaggcaggagtttctctcggtgactactatcgctgtcatgtctggtcgtggcaagcaaggaggcaaggcccgcgccaaggccaagtcgcgctcgtcccgcgctggccttcagttcccggtagggcgagtgcatcgcttgctgcgcaaaggcaactacgcggagcgagtgggggccggcgcgcccgtctacatggctgcggtcctcgagtatctgaccgccgagatcctggagctggcgggcaacgcggctcgggacaacaagaagacgcgcatcatccctcgtcacctccagctggccatccgcaacgacgaggaactgaacaagctgctgggcaaagtcaccatcgcccagggcggcgtcttgcctaacatccaggccgtactgctccctaagaagacggagagtcaccacaaggcaaagggcaagtgaggctgacgtccggcccaagtgggcccagcccggcccgcgtctcgaaggggcacctgtgaactcaaaaggctcttttcagagccaccca

SEQ ID NO: 2566 - DNA, 456 bp, Homo sapiens
tttttgccctatgttttggcccttgatgtatttgtgggaggaagatgggtagactggctaactgtgatatcaactgatttctgaatgatacagttataccctgagtcagtttctggagattaagcaagggtgccaggagcgttgtgaagggctctcattgtttttacatgtcagtgactgcctgccttggttttgccagctgcaaaatggaagaactaagccctcttttgcctagagaatgctaaaaggtgaatactcaggtgtggtggggaggtttctaaggacacccagaccccagatgatgcactaagagtgctgtgtgacctgaagagggacctctggtcagaacatttttttctgtcaccagcaactgaataattatgcccagttggtagaataggagaactgttggcctgggaccctgagatctgaccatgatgttccccattggactaa

SEQ ID NO: 2567 - DNA, 2357 bp, Homo sapiens; identical to SEQ ID NO: 2209

SEQ ID NO: 2568 - DNA, 3126 bp, Homo sapiens; identical to SEQ ID NO: 815

SEQ ID NO: 2569 - DNA, 2456 bp, Homo sapiens
actaccgcgaggaacagcgcccaaagtcacgcgaagatgcagtttctccgtatccgcaggcttctttcgctggcgccattacctgagttctcctccagcgtttccgcaccctctccgattagcggtcccaggagtttccaaggtaaccgcgcagtagggcggatctcattaggcggaaagcgaaacccggaagtgacgctcttaccgggtgtcagcagcgagagggttcgaagatggcggcgcgcaagggtcggcggcgcacgtgtgaaaccggggaacccatggaagccgagtccggcgacacaagttccgagggcccggcccaggtctacctgcccggccgggggccgccgctacgcgaaggggaggagctggtcatggacgaggaggcctatgtgctctaccaccgagcgcagactggcgccccctgtctcagctttgacatagtccgggatcacctgggagacaaccggacagagcttcctcttacactttacttgtgtgctgggacccaggctgagagcgcccagagcaacagactgatgatgcttcggatgcacaatctgcatgggacaaagcccccaccctcagagggcagtgatgaagaagaagaggaggaagatgaagaggatgaagaagagcggaaacctcagctggagctggccatggtgccccactatggtggcatcaaccgagttcgggtgtcatggctgggtgaagagcctgtggctggggtgtggtcagagaagggccaggtggaggtgtttgcgctgcggcggcttctgcaggtggtggaggagccccaggccctggcagccttcctccgggatgagcaggcccaaatgaagcccatcttctccttcgctggacacatgggcgagggctttgcccttgactggtccccccgggtgaccggtcgcctgctgaccggtgactgtcaaaagaacatccacctctggacacctacggacggcggctcctggcacgtggaccagcggccattcgtgggccacacacgctctgtggaggacctgcagtggtcaccgactgagaacacggtgtttgcctcctgctcagctgacgcctccatccgcatctgggacatccgggcagcccccagcaaggcctgcatgctcaccacagccaccgcccatgatggggacgtcaatgtcatcagctggagccgccgggagcccttcctgctcagtggcggggatgatggggccctcaagatctgggaccttcggcagttcaagtctggttccccagtggccaccttcaagcagcacgtggcccccgtgacctccgtcgagtggcacccccaggacagcggggtctttgcagcctcgggtgcagaccaccagatcacacagtgggacctggcagtggagcgggaccctgaggcgggcgacgtggaggccgaccccggactggccgacctcccgcagcagctgctgttcgtgcaccagggcgagaccgagctgaaggagctgcactggcacccgcagtgcccagggctcctggtcagcacggcgctgtcaggcttcaccatcttccgcaccatcagcgtctgaggcgtcccactggctctgatcttgcttcctgcttggaaactgaagtcgaattgggctcccctggaaggggttcattcaggtctgttgactgagactggccggcctgtgggctgccgtgatggattctgtttgacgtattgttctctagaaggcctggctctgatccagtgacccctctcaccaaagaactcggtttaaccagggctctgtaagaccactcccacccagagacttgtgtggcctggtgtggcctgtgtgtcggattccttcctgtcagctgtgacccatttgacctgtgtccccagaacccagttttttgtttgtttgtttgagacggagtcttggtctgtcgcccaggctggagtgcagtagcacgatcttggctcactgcaacctccgcctcctgggttaaagtgattctctcagctcagtctcccaggtagctgggattacaggcatgtgccaccacaccccgttaatttttgtatttttagtagagacggggtttcaccatgttggccaggctggtctcaaattcttgatctcaagtgatctgtccgccccggcctcccagagtgctgggttgggattacaggcgtgagccaccgcgtccggctcaggacccagttttggctgctggttcccagcaggggactcgggggatatacagtggctgcaccaaattggaggtgtgggttcctccaacacaatttgcttctgcccgttgtcttcctgccagctgggtttggccaggatttctccgtgtgggggctacatgcgaccctctcccctcctccctgactttagaggctggtgctgtgtcgggaggaaggtcagggctcctgagcagcaataaaggaccaggaagaggcctgaggtgta

SEQ ID NO: 2570 - DNA, 2098 bp, Homo sapiens; identical to SEQ ID NO: 2370

SEQ ID NO: 2571 - DNA, 9252 bp, Homo sapiens
ggcctgggcgcgtccctgcagcgtggcgggacggccccgttccagtcacccccgcctcgctgcggtggcctcgggcctgggcgcccgccttcagctgcggcggagctggctctgtaaatgccggtgcccgcgagccctcctgaatgcttgtctgcgcccgacgagcgcggcctgtcccgaagctgtccactgccaccactcgggcagtgcttgctttagcctggccctttgcagctgaaaggcgtgacatggtgtcgggtggttcgtgggaagtcggggtttcaggagtccgtgtacttccttgtttgtctttgtcgctggccgacttgtcttcattccaggtggccagagcgagtggggccgggcgttgtcacgggtatcatgatattagctggtttgacatcaagtcatttgtgagtcatcagatcttctcctgaaaatgggagacacagtagggcccctcccaggagctcttggctgttgctgatggcagaagccaagcttgtccaaggttcacttgtagcccctcagcgtcagctcagctggtgtcgtcctgaccatggacggcgcgtcggccgagcaagatggcctccaggaggacagatcccacagtggcccctcgtctctccccgaggccccactgaagcccccgggcccactggtgccacctgaccagcaggacaaagtccagtgtgccgaggtaaacagagcatccacggaaggggaaagcccggatggacctggccagggaggcctctgtcagaacgggccaacgccacccttcccagaccctccgtcgtctctcgatcccaccacaagcccagtgggccctgatgcctctccaggtgtggctggtttccatgacaacctaaggaagtctcagggaactagtgctgagggcagtgttagaaaagaagctttgcagtctctcagactcagtcttcctatgcaagaaacgcaactgtgctctacagattctcccctgcccctggagaaggaggagcaggtccgacttcaggctcggaagtggctggaagagcagctcaaacagtacagggtgaagcgccagcaggagaggtccagtcaacctgcaaccaaaacgagactttttagcacgcttgatcctgagctcatgttaaacccagaaaacttaccaagggccagtaccctggctatgacaaaagaatattccttcctgcgcaccagtgtccctcgggggcctaaggtgggcagcctggggcttccggcacatcctagggagaaaaaaacttccaaatcaagcaaaatccggtctctggccgattacagaactgaagattcaaatgcggggaattctgggggaaatgtcccggctcccgattctaccaagggttccctgaagcagaacagaagcagtgcggcgtccgttgtgtctgagatcagcctgtcccccgacactgacgaccgtctggagaacacctccctggctggagacagcgtgtctgaggtggatggaaatgacagcgacagctcatcgtacagcagcgcctccacccgagggacctatggcattctgtcgaagacagtgggcacgcaggacaccccctatatggtcaacggccaggagattcctgcggataccctgggccagttcccctccattaaggacgtcctccaggccgcagccgctgagcaccaagaccaggggcaggaggtcaacggggaggtgcggagtcggagagacagcatctgcagcagcgtgtccttggagagctctgcagcagaaacacaggaggagatgctgcaggtgctcaaagagaaaatgcgactcgaaggacagctggaagccttgtcactggaggcgagtcaggcacttaaagagaaggctgagctgcaggcccagctggccgccctcagcacgaagctgcaggcgcaggtggagtgcagccacagcagccagcagcggcaggattcgctgagctcggaggtggacaccctgaagcagtcgtgctgggacctggagcgagccatgactgacctgcagaacatgctggaggcaaaaaatgccagcctggcgtcgtccaacaacgacttgcaggtggccgaggagcagtaccagaggcttatggccaaggtagaggacatgcagaggagcatgctcagcaaggacaacacagtgcacgacctgcgacagcagatgacagccttgcagagccagcttcagcaggtgcagctggagcggacgacgctgaccagcaagctgaaggcgtcgcaggcggagatctcgtccctgcagagtgtccggcagtggtaccagcagcagctcgccctggcacaggaggcccgcgtcaggctgcagggtgagatggcccacatccaggttggacagatgacccaggcaggtctcctggagcacctgaaactcgagaatgtgtccctgtcccagcagctgacggaaactcagcacaggtccatgaaggagaaggggcgcatcgcggcacagctgcagggcattgaggctgacatgttggatcaggaagcagccttcatgcagattcaggaggcaaagacgatggtggaggaggaccttcagaggaggctggaagagtttgaaggtgagagggagcggctgcagaggatggcggactcggcggcatccctggagcagcagctggagcaggtgaagttgactttactccagcgagaccagcagcttgaggctttgcagcaggagcacctggacctgatgaaacagctcaccttgactcaggaggctctgcagagcagggagcagtccctcgatgccctgcagacacactacgatgagctgcaggccaggctgggggagctgcagggcgaggccgcctccagggaggacacgatctgcctcctgcagaacgagaagatcatcttggaggcggctttgcaggcggccaagagtggcaaggaggagcttgacagaggagcaagacgcttggaagaaggtaccgaggaaacgtcggaaactttagagaagttaagagaagaattagctatcaaatccggccaggtggaacacctgcagcaggagactgctgctctgaaaaagcaaatgcaaaaaataaaggaacagtttctccaacaaaaggtgatggtggaggcctaccggcgcgacgccacctccaaagaccagctcatcagtgagctgaaagccaccaggaagaggctggactcggagctgaaggagctgcggcaggagctgatgcaagtgcacggggagaagcggactgccgaggcggagctctcgcgcctgcacagagaggtggcccaggtccgtcagcacatggcggaccttgaagggcatctccagtcggcgcagaaggagcgagacgagatggaaacacacttgcagtcgttgcagttcgataaggagcagatggtcgcggtcacagaggccaatgaggcgctgaagaaacaaatcgaagagttgcagcaagaggcccggaaggccatcacggaacagaagcagaagatgaggcggctgggctcagacttgaccagcgcccagaaggagatgaagaccaaacataaggcctacgagaacgccgtgggcatcctcagccgccgcctgcaggaggccctcgcggccaaggaggctgcggacgcggagctgggccagctccgagcccagggtggcagcagtgacagcagcctggctctacatgaaaggatccaggccctggaggcggagctgcaggctgtcagtcatagcaagacgctgctggaaaaggaactgcaggaggtcatagcgctgaccagccaggagctggaggagtcccgggagaaggtgctggagctggaggacgagcttcaagaatccagaggctttaggaagaagataaaacgccttgaggagtcaaacaagaagttggctcttgaattagagcacgagaaagggaagcttacgggcctcggtcagtccaacgcagctctgcgggaacacaacagcatcctagaaacagctttggccaagagggaggcagacctagtccagttgaaccttcaggtgcaggcagttttgcagcgcaaagaagaggaggatcgccagatgaagcatcttgtccaggccctgcaggcctcactagagaaggagaaggagaaggtgaacagcctcaaggagcaggtggctgctgccaaggtggaagccgggcataaccgccgccacttcaaggcggcctccttggagctgagtgaggtgaagaaggagctgcaggccaaggaacacctggtgcagaagctgcaggccgaggccgacgaccttcagattcgggaggggaaacattcccaggagatagcacagttccaagcagagctggccgaggcccgggcacagctccagctcctgcagaagcagctggacgagcagctcagcaaacagcccgtgggaaaccaagagatggaaaatctcaaatgggaggtggatcagaaagaaagagaaatccagtccttgaagcagcagctggacttgacggagcagcagggcaggaaggaactggaagggctacagcagctgctgcagaacgtcaagtctgagttggagatggcccaggaagacctgtccatgacccagaaggataaatttatgctccaggcaaaagtgtcggagctgaagaacaacatgaagaccctgctccagcagaaccagcagctcaagctggacctacgccgcggcgcggccaagacgagaaaggagccgaaaggcgaggccagctcttccaaccctgccacgcccatcaagatcccggactgcccagttcccgcctcgctgctggaggagctgctgagaccaccgcccgccgtgagcaaggagcccctcaagaacctgaacagctgcctccagcagctcaagcaggagatggacagcctgcagcgccagatggaggagcacgccctgacggtgcacgagtctctgtcctcgtggacgccgctggagccagccactgccagccctgtgcccccggggggtcacgccggcccacgcggcgacccacagagacacagtcagagcagggcttccaaagaagggccgggagagtgactgctgtggactcgcctccgtgcgccgctgccccagaaggctcttatcaatgttatttatttgattgtgtggtcgatgtttttctaagacatgaaatttaagttttgttttgcctttaacaagaagtaaaatatatagcagaatgagagccaaggactagaaaaacattcgaagatcacaattagcttttcacatggaatgaccaactcttaaaagcctgataggctctcggcgaggagctttgaacgtgtctgaagggttacttgtaggtcgtggcttctgagcggccaccgatgctgctctctgcgggtgacagggagaggctgcgtaactgggagcagctgtgtgacagggtctgcggcaccgcgcctggccaggccggctgcagtttctcacttccctgttccattcagtaagagctttacttttccgcagaaatgaaattttatctgtacctttggctttttacttgtttttttggatagccatcccaccataggatgtgtacatagatactgaatatcataatccaatctttgttttttttttttttttttttttgagacagagtctcgctttgttgcccaggctggagtgcagtggcacactctccgctcactgcaagctccgcctcccaggttcatgcgattctcctgcctcagcctctcgagtagctgggattacaggcgtgcgccactatgccaggctaatgtttgtatttttagtagcaatggggtttcaccatgttggccaggatggtctcgatctcctgacctcaagtgatctgcccatctcagcctcccaaagtgctgggattacaggcgtgagcccctgcgcccggcctgtcacccagtctttaagaagcatatgctcatgttattgaagaagaacctacttattattgattgccttttgaaaatttgttgggaataatttacctgcaggatttagggatagtcagaaaattctaagaaatataattattttatttaccttctaaagccaaatattcttacacagaaaggtcctctgttgttctggttttactttgttgctgaggatctttccttcctgctggtctcttcctctcaggccactggccctgtgtgattccaccgtggctggccactgggaaggggcagcttggacccttggtcaggcctgacggccatcaggaggcacaaggacactgaggccccatatctgatctgacctttgggggggcacagggagaggccggtggaggaggaggaggagagcagaccaggggctccctgcagcgactcccgcggtttcccctggagtcagccaggtgtaggtcgcaggcggtaacaaacctcacactcctgttccccaagtgaaaatctttaccattgtctgtgggagcgcctgtactcgtgtgtaggagcacctgtacttctgcagtcatcgagaagtcctggatcttttgtggttacaccagcatcatgtggcaagcagaggcgacttccggaagagacaggcaggcaccgtgaggaaggtggctgtgctctcccaggtgtctcagagacagatgccttatttaaaatcagcacgacatgtgtgagatcttctgtttcctaccccaaatcctgaaaccctgcagacactggctgactgggagaggtggggtctgtaagttgtcccctagtttgctaagaaaatctaaaataatatttattatatgagttaggagagagagaatgggtccgcgtggcctcctctgcagatgtactggtctgaaatgaggttctgagtcactggccaggccagatgtgctcatgtcggtgtctggtgtctgttttgtggagaaaacagtatggtgtgttttaagctatttgtgttctgttgtaatatacttttagaaggttaattggtaaggttaaggtagcattaaccacaaagatgtttggtatttaaaaaatattctctagcaaatattggaatttccaaaatatatcatttgtacagggttaattttgaaataatacttgaaaatttcattataaatatatcctactttttatcttaagttgaagatgttatttactaaattgttcttgtaccattagaaaaaaaaatacggcaatttacgttcttatttattttggctgtactacccctttgttttaattttaaaatcaagaaatcgggccgggcgcggtggctcatgcctgtaatcccagcactttgggaggccgaggcgggtggatcacctgaggtcaagaggtccagaccatcctggccaacatggcaaaaccccgtctttactaaacatacaaaaattagccgggtgtcgtagtgcgcacctataatcccagctacttgggaggctgaggcaggagaatcacttgaacccaggaggcggagcttgcagtgagccgagatcgcgccactgccctccagcctgggcaacagagcgagactccgtctcaaaaataaataaatgattttaaaaaatctaaaatcgagaaatcacacattcagtggggagcgacttctccttgcttatgggaagtcctcaagtgagtgatgttcaccatgtatttttttttctcttaggacagactaattctgaaaataccgaaggaaaagtagctctatgttctcaccccggttttcctgcgtgtgtgcccttgggtgcgatgcctcccccagcgctctgtggtcgccggtgccagggccccctctggtttggcagggcctggctgcctttgctccctgcagtgagtcttttggtgttttcatgcacggcttgtgcttctggatctgaggcctctcgtgttcacgcggacacttccttccttaagaagacgcctaaaagaggaagttggaattttttttttttttttttgagacagagtctcgctctgtcgcccaggctggagtgcagtggcgtgatctctgctcactgcaagctccgccatctgggttcaagcgattctcctgcctcattctccccagtagctgggattacaggtgcccgccaccacaccagcctaatttttgtatttttagaggggtggagttccaccatgttggccaggctggtcttgaactcttgacctcaggtgatcctgagcctcagcctcccaaagtgctggaattataggcgtgaaccaccgcccccggctgcagttggatttttaaattgcttttttttattgttgaggtttttttatctccaagggactctcccggcacttctaccttccagagttacttcagtgcataaagtttgaattattttgttcttgtgggcagaagtgggaatgatggaatatcctcacggaaaaggcagtgaagttgggagtactgcttacaaaacagggtcaccagtgcattatgtggcgtgttcatccccacgccgtgtgtcacgggctagggcggcgtgttcatccccacaccgtgtgtcacaacaggctagggcacttcacgatgtcactacttgtttttctgatgttccaaaaacaacgtaacttggttttcatgtgtttttccgtggtatatgtgagattgatgctacgggtcttacggactcacacccgttcccactctctgcaatatggatcaggcagtgtttctgataggatgtgaaatggactctcctcgggtgggtccagcaggggccctgcccaccagaacacagtccgtgctgtgctgcgctaaggagctggccctcaactctccttggtgcagggttcccacaaccgagttctagttccctgaggtctttaaaaacaaaaacagaatgttgtacgtgaagattctaggaggggagggaccagcaaatctgagagaaccgtcctggggcctcccttcgaggagccctctgatgtgaggagggacttgagttgagtgacgctgtggtgtgaggtgttctgagctcactgaccggaaggtccaggtgaatctcgtcataagtgatctcaggctctcacaggatccggagggaaatgtgttagagggtctggaaaattcagtgcttttgagttacttgtttttattaaaaatttcctcacaaaagagagtcctcaagttgtggctgttcttgggaaaggggtcaccgtgtctgacaaagtgtaactttaaaaagcacgttgattttttacaaatgtaagtgtgcttgggaattccttaaattttgtgcaataaactattttttggtaaagattttc

SEQ ID NO: 2572 - DNA, 882 bp, Homo sapiens
ataatcccttaactgcagtctcaggccccacccctggggatactggttatccacaactatcaacagctctctcctgcctgtccagcctgggcatcctcagcctatgaaatccatctgcctctctagtccaccaaccctataggcctatttgccccacacaaggcctctagaacaccctccttctgcatgactcatcagggcactttgtgaagagtgaggcgatcttgagggcatgttcatcttcatcaaacatggagataatcagcagtttctggtcaataccaactgtgctgtcgtcgtgttgctgtattacatccgcagtaaagtaaagttgcctaaaacaaacaccatcgatttgtgtgaacaaacggggaaaatgaagatgcttttcctgatgaagcccaatcatgcagagtatgccagcaaataccttacagctcgaagcacctactacgtttgtaaggtggaacgtgggccaccaggaaccaggctggagaatgcttacagagcttttgtgcctctcctcaagaatccggagccttggctgcttgttgcactgcgcatacaatgtgatgccctggagaggagacgaattcagatgcttaaaatgaaagaagccaagaaggtcgttataattgaaccccctgcgagtgtcccgtccaagcaatcaggacgatcagacaaaaagaagtccactcgcaagtctccgacctttaggaacagaccagacttcaggaagaataaaggtcgccaactcaataaaaccaccaagcaaaagaagtaatactaggtgtgaaattactggaatttaacgtgagatttctttttctagaaagactccttctcccaatatctgcactaaggcttgagtacatacgcccc

SEQ ID NO: 2573 - DNA, 1360 bp, Homo sapiens
gcccttgccttgagtcagtgcgctgctctccagcccgcttgaacgctccccgcagccaccgccacccattggaatggccaacaggggacctgcatatggcctgagccgggaggtgcagcagaagattgagaaacaatatgatgcagatctggagcagatcctgatccagtggatcaccacccagtgccgaaaggatgtgggccggccccagcctggacgcgagaacttccagaactggctcaaggatggcacggtgctatgtgagctcattaatgcactgtaccccgaggggcaggccccagtaaagaagatccaggcctccaccatggccttcaagcagatggagcagatctctcagttcctgcaagcagctgagcgctatggcattaacaccactgacatcttccaaactgtggacctctgggaaggaaagaacatggcctgtgtgcagcggacgctgatgaatctgggtgggctggcagtagcccgagatgatgggctcttctctggggatcccaactggttccctaagaaatccaaggagaatcctcggaacttctcagataaccagctgcaagagggcaagaacgtgatcgggttacagatgggcaccaaccgcggggcgtctcaggcaggcatgactggctacgggatgccacgccagatcctctgatcccaccccaggccttgcccctgccctcccacgaatggttaatatatatgtagatatatattttagcagtgacattcccagagagccccagagctctcaagctcctttctgtcagggtggggggttcagcctgtcctgtcacctctgaggtgcctgctggcatcctctcccccatgcttactaatacattcccttccccatagccatcaaaactggaccaactggcctcttcctttcccctgggaccaaaatttaggggcctcagtccctcaccgccatgccctggcctattctgtctctccttcttccccctggcctgttctgtctctgagctctgtgtcctccgttcattccatggctgggagtcactgatgctgcctctgccttctgatgctggactggccttgcttctacaagtatgcttctcccacagctgtggctgcaggaacttaatttatagggaggagcctgtggcagctgctgccccagccacagctgcactgactgtgctcaccacacatctggggcagccttccctggcaggggccctcgtggcttctcattttccattcccttcactgtggctaaggggtggggtgaggggatggagagggagggctgcctaccatggtctggggcttgaggaagatgagtttgttgatttaaataaagaatttgtcatttttg

SEQ ID NO: 2574 - DNA, 5388 bp, Homo sapiens
aaaatgttggagatctgcctgaagctggtgggctgcaaatccaagaaggggctgtcctcgtcctccagctgttatctggaagaagcccttcagcggccagtagcatctgactttgagcctcagggtctgagtgaagccgctcgttggaactccaaggaaaaccttctcgctggacccagtgaaaatgaccccaaccttttcgttgcactgtatgattttgtggccagtggagataacactctaagcataactaaaggtgaaaagctccgggtcttaggctataatcacaatggggaatggtgtgaagcccaaaccaaaaatggccaaggctgggtcccaagcaactacatcacgccagtcaacagtctggagaaacactcctggtaccatgggcctgtgtcccgcaatgccgctgagtatctgctgagcagcgggatcaatggcagcttcttggtgcgtgagagtgagagcagtcctggccagaggtccatctcgctgagatacgaagggagggtgtaccattacaggatcaacactgcttctgatggcaagctctacgtctcctccgagagccgcttcaacaccctggccgagttggttcatcatcattcaacggtggccgacgggctcatcaccacgctccattatccagccccaaagcgcaacaagcccactgtctatggtgtgtcccccaactacgacaagtgggagatggaacgcacggacatcaccatgaagcacaagctgggcgggggccagtacggggaggtgtacgagggcgtgtggaagaaatacagcctgacggtggccgtgaagaccttgaaggaggacaccatggaggtggaagagttcttgaaagaagctgcagtcatgaaagagatcaaacaccctaacctggtgcagctccttggggtctgcacccgggagcccccgttctatatcatcactgagttcatgacctacgggaacctcctggactacctgagggagtgcaaccggcaggaggtgaacgccgtggtgctgctgtacatggccactcagatctcgtcagccatggagtacctggagaagaaaaacttcatccacagagatcttgctgcccgaaactgcctggtaggggagaaccacttggtgaaggtagctgattttggcctgagcaggttgatgacaggggacacctacacagcccatgctggagccaagttccccatcaaatggactgcacccgagagcctggcctacaacaagttctccatcaagtccgacgtctgggcatttggagtattgctttgggaaattgctacctatggcatgtccccttacccgggaattgacctgtcccaggtgtatgagctgctagagaaggactaccgcatggagcgcccagaaggctgcccagagaaggtctatgaactcatgcgagcatgttggcagtggaatccctctgaccggccctcctttgctgaaatccaccaagcctttgaaacaatgttccaggaatccagtatctcagacgaagtggaaaaggagctggggaaacaaggcgtccgtggggctgtgagtaccttgctgcaggccccagagctgcccaccaagacgaggacctccaggagagctgcagagcacagagacaccactgacgtgcctgagatgcctcactccaagggccagggagagagcgatcctctggaccatgagcctgccgtgtctccattgctccctcgaaaagagcgaggtcccccggagggcggcctgaatgaagatgagcgccttctccccaaagacaaaaagaccaacttgttcagcgccttgatcaagaagaagaagaagacagccccaacccctcccaaacgcagcagctccttccgggagatggacggccagccggagcgcagaggggccggcgaggaagagggccgagacatcagcaacggggcactggctttcacccccttggacacagctgacccagccaagtccccaaagcccagcaatggggctggggtccccaatggagccctccgggagtccgggggctcaggcttccggtctccccacctgtggaagaagtccagcacgctgaccagcagccgcctagccaccggcgaggaggagggcggtggcagctccagcaagcgcttcctgcgctcttgctccgcctcctgcgttccccatggggccaaggacacggagtggaggtcagtcacgctgcctcgggacttgcagtccacgggaagacagtttgactcgtccacatttggagggcacaaaagtgagaagccggctctgcctcggaagagggcaggggagaacaggtctgaccaggtgacccgaggcacagtaacgcctccccccaggctggtgaaaaagaatgaggaagctgctgatgaggtcttcaaagacatcatggagtccagcccgggctccagcccgcccaacctgactccaaaacccctccggcggcaggtcaccgtggcccctgcctcgggcctcccccacaaggaagaagctggaaagggcagtgccttagggacccctgctgcagctgagccagtgacccccaccagcaaagcaggctcaggtgcaccagggggcaccagcaagggccccgccgaggagtccagagtgaggaggcacaagcactcctctgagtcgccagggagggacaaggggaaattgtccaggctcaaacctgccccgccgcccccaccagcagcctctgcagggaaggctggaggaaagccctcgcagagcccgagccaggaggcggccggggaggcagtcctgggcgcaaagacaaaagccacgagtctggttgatgctgtgaacagtgacgctgccaagcccagccagccgggagagggcctcaaaaagcccgtgctcccggccactccaaagccacagtccgccaagccgtcggggacccccatcagcccagcccccgttccctccacgttgccatcagcatcctcggccctggcaggggaccagccgtcttccaccgccttcatccctctcatatcaacccgagtgtctcttcggaaaacccgccagcctccagagcggatcgccagcggcgccatcaccaagggcgtggtcctggacagcaccgaggcgctgtgcctcgccatctctaggaactccgagcagatggccagccacagcgcagtgctggaggccggcaaaaacctctacacgttctgcgtgagctatgtggattccatccagcaaatgaggaacaagtttgccttccgagaggccatcaacaaactggagaataatctccgggagcttcagatctgcccggcgacagcaggcagtggtccagcggccactcaggacttcagcaagctcctcagttcggtgaaggaaatcagtgacatagtgcagaggtagcagcagtcaggggtcaggtgtcaggcccgtcggagctgcctgcagcacatgcgggctcgcccatacccgtgacagtggctgacaagggactagtgagtcagcaccttggcccaggagctctgcgccaggcagagctgagggccctgtggagtccagctctactacctacgtttgcaccgcctgccctcccgcaccttcctcctccccgctccgtctctgtcctcgaattttatctgtggagttcctgctccgtggactgcagtcggcatgccaggacccgccagccccgctcccacctagtgccccagactgagctctccaggccaggtgggaacggctgatgtggactgtctttttcatttttttctctctggagcccctcctcccccggctgggcctccttcttccacttctccaagaatggaagcctgaactgaggccttgtgtgtcaggccctctgcctgcactccctggccttgcccgtcgtgtgctgaagacatgtttcaagaaccgcatttcgggaagggcatgcacgggcatgcacacggctggtcactctgccctctgctgctgcccggggtggggtgcactcgccatttcctcacgtgcaggacagctcttgatttgggtggaaaacagggtgctaaagccaaccagcctttgggtcctgggcaggtgggagctgaaaaggatcgaggcatggggcatgtcctttccatctgtccacatccccagagcccagctcttgctctcttgtgacgtgcactgtgaatcctggcaagaaagcttgagtctcaagggtggcaggtcactgtcactgccgacatccctcccccagcagaatggaggcaggggacaagggaggcagtggctagtggggtgaacagctggtgccaaatagccccagactgggcccaggcaggtctgcaagggcccagagtgaaccgtcctttcacacatctgggtgccctgaaagggcccttcccctcccccactcctctaagacaaagtagattcttacaaggccctttcctttggaacaagacagccttcacttttctgagttcttgaagcatttcaaagccctgcctctgtgtagccgccctgagagagaatagagctgccactgggcacctgcgcacaggtgggaggaaagggcctggccagtcctggtcctggctgcactcttgaactgggcgaatgtcttatttaattaccgtgagtgacatagcctcatgttctgtgggggtcatcagggagggttaggaaaaccacaaacggagcccctgaaagcctcacgtatttcacagagcacgcctgccatcttctccccgaggctgccccaggccggagcccagatacgggggctgtgactctgggcagggacccggggtctcctggaccttgacagagcagctaactccgagagcagtgggcaggtggccgcccctgaggcttcacgccgggagaagccaccttcccaccccttcataccgcctcgtgccagcagcctcgcacaggccctagctttacgctcatcacctaaacttgtactttatttttctgatagaaatggtttcctctggatcgttttatgcggttcttacagcacatcacctctttgcccccgacggctgtgacgcagccggagggaggcactagtcaccgacagcggccttgaagacagagcaaagcgcccacccaggtcccccgactgcctgtctccatgaggtactggtcccttccttttgttaacgtgatgtgccactatattttacacgtatctcttggtatgcatcttttatagacgctcttttctaagtggcgtgtgcatagcgtcctgccctgccccctcgggggcctgtggtggctccccctctgcttctcggggtccagtgcattttgtttctgtatatgattctctgtggttttttttgaatccaaatctgtcctctgtagtattttttaaataaatcagtgtttacattagaa

SEQ ID NO: 2575 - DNA, 3188 bp, Homo sapiens
gggcggggctgggcgcaggcagtctcccgccgccgccgccgctgccggacgcgcagagcgaggggcggctggaccgacggctgccgggccgagcgcacagagtcgcggcgcagggggcgtccccggccgggacgcgggtcgcgtcgttgtcctccgcgagcgtccggattgcaggctgtctgtccccagaccccagagcacgtccggcaccaccatgactgggctgttgaagaggaaatttgaccagctggatgaggacaactcctcggtctcctcctcctcctcttcctctgggtgccagtctcgctcctgctccccaagctcttctgtctcccgtgcctgggactcagaggaggaaggcccctgggatcagatgcccctgcctgaccgtgacttctgcggccccagaagtttcacccccctgtctatcctgaagcgggctcgccgggagcgcccaggccgtgtagcctttgatgggatcaccgtcttctacttcccccgctgccagggcttcaccagtgtgcccagccgtggtggctgtactctgggtatggcccttcgccacagtgcttgccgtcgcttctctttggctgagtttgcgcaggagcaagcccgtgcacggcacgagaagctccgccagcgcttgaaagaggagaagttggagatgctgcagtggaagctttcggcagctggggtaccccaggcagaggcagggctgccacctgtggtggatgccattgatgacgcctctgtggaggaggacttggcagtcgctgtggcaggtggccggttggaagaagtgagcttcctacagccctacccagcccggcgacgtcgagctctgctgagggcttcaggtgtgcgaaggatcgatcgggaggagaagcgggagctgcaggcactgcgccaatcccgggaggattgtggctgtcactgcgataggatctgcgaccctgagacctgcagctgcagcctggcaggcatcaagtgccagatggaccacacagcattcccctgtggctgctgcagggagggctgtgagaaccccatgggccgtgtggaatttaatcaggcaagagttcagacccatttcatccacacactcacccgcctgcagttggaacaggaggctgagagctttagggagctggaggcccctgcccagggcagcccacccagccctggtgaggaggccctggtccctactttcccactggccaagccccccatgaacaatgagctgggagacaacagctgcagcagcgacatgactgattcttctacagcatcttcatcagcatcgggcactagtgaggctcctgactgccccacccacccaggcctgcctggccctggcttccagcctggcgttgatgatgacagcctggcacgcatcttgagtttcagtgactctgacttcggtggggaggaggaggaagaggaggaagggagcgtggggaacctggacaacctcagctgcttccatccagctgacatctttggtactagtgaccctggtggcctggccagctggacccacagctattctggctgtagcttcacatcaggcgtcctggatgagaatgccaacctggatgccagctgcttcctaaatggtggccttgaagggtcaagggaaggcagccttcctggcacctcagtgccacccagcatggacgctggccggagtagctcagtggatctcagcttgtcttcttgtgactcctttgagttactccaggctctgccagattatagtctggggcctcactacacatcacagaaggtgtctgacagcctggacaacatcgaggcacctcacttccccctgcctggcctgtctccacctggggatgccagcagttgcttcctggagtccctcatgggcttctccgagccagccgccgaagccctagatccctttattgacagccagtttgaggacactgtcccagcatctctaatggagcctgtgccggtgtgaggaccaggatgtcttttcccagccccaagagacctgttgctgctttcttgtaattatggggctccccagagtctgcgtaacagtctcccactggctggctcacccacaggtgccatgtgcacactcctggttttcaaacaattctctggatttatttatttgttttaacttttctgtgctgaagagaggactggggggagggggcttcccctttcagctgcccggccccccacacccacagcttgctcttctatctccacaacgtgagcctggaagaggagaaaatgtggctcctctggagcttggcagaccacttttcggtctttgcgtgatgttccttagcccaaagacggtgagacagggctgaaatcaggtggcttctgccaccctgagccctagacccatgggtggctaaatccactggactgtgaagactataatttatttccataatttatttggagattgaggaggctttggttgcacttctttggctggtgggtaatgccaggggtggggtgggcacaggccctcaagagccccttttgccttgtagtcctacaccttgccctgcctgggctttggtgcagactaggtgtggatttgagctctgtgatctatgtctgctgcctggctcctagatggctctgtgggcaggtgctggccaaggacatcatctaggcagggggagagcctgggctgaacagctgtgaccaaaactcccttctgccccaccctgccccctccacttcctgccctctgttccatcttcccccttcccaaaggccacagcctttattccaggcccagggatgtaggagggggaaggaggaaacaggaagcccagagagggcaaagggcctacctcggggcgcgaaccatgccccagactattatctcagggctttctgggcactgcacttcagcgtggcccacctgcccatgccctgaggccagttggcgaggggtggctcctgagggtttttataccctttgtttgctaatgtttaattttgcatcataatttctacattgtccctgagtgtcagaactataatttattccatttctctctgtgtctgtgccaagaaacgcaggctctgggcctgccccttgcccaggaggccttgccagcctgtgtgcttgtgggaacaccttgtacctgagcttacaggtaccaataaagaggctttatttttagcaa

SEQ ID NO: 2576 - DNA, 5101 bp, Homo sapiens
cactcctccccatcctctccctctgtccctctgtccctctgaccctgcactgtcccagcaccatgggacccacctcaggtcccagcctgctgctcctgctactaacccacctccccctggctctggggagtcccatgtactctatcatcacccccaacatcttgcggctggagagcgaggagaccatggtgctggaggcccacgacgcgcaaggggatgttccagtcactgttactgtccacgacttcccaggcaaaaaactagtgctgtccagtgagaagactgtgctgacccctgccaccaaccacatgggcaacgtcaccttcacgatcccagccaacagggagttcaagtcagaaaaggggcgcaacaagttcgtgaccgtgcaggccaccttcgggacccaagtggtggagaaggtggtgctggtcagcctgcagagcgggtacctcttcatccagacagacaagaccatctacacccctggctccacagttctctatcggatcttcaccgtcaaccacaagctgctacccgtgggccggacggtcatggtcaacattgagaacccggaaggcatcccggtcaagcaggactccttgtcttctcagaaccagcttggcgtcttgcccttgtcttgggacattccggaactcgtcaacatgggccagtggaagatccgagcctactatgaaaactcaccacagcaggtcttctccactgagtttgaggtgaaggagtacgtgctgcccagtttcgaggtcatagtggagcctacagagaaattctactacatctataacgagaagggcctggaggtcaccatcaccgccaggttcctctacgggaagaaagtggagggaactgcctttgtcatcttcgggatccaggatggcgaacagaggatttccctgcctgaatccctcaagcgcattccgattgaggatggctcgggggaggttgtgctgagccggaaggtactgctggacggggtgcagaacccccgagcagaagacctggtggggaagtctttgtacgtgtctgccaccgtcatcttgcactcaggcagtgacatggtgcaggcagagcgcagcgggatccccatcgtgacctctccctaccagatccacttcaccaagacacccaagtacttcaaaccaggaatgccctttgacctcatggtgttcgtgacgaaccctgatggctctccagcctaccgagtccccgtggcagtccagggcgaggacactgtgcagtctctaacccagggagatggcgtggccaaactcagcatcaacacacaccccagccagaagcccttgagcatcacggtgcgcacgaagaagcaggagctctcggaggcagagcaggctaccaggaccatgcaggctctgccctacagcaccgtgggcaactccaacaattacctgcatctctcagtgctacgtacagagctcagacccggggagaccctcaacgtcaacttcctcctgcgaatggaccgcgcccacgaggccaagatccgctactacacctacctgatcatgaacaagggcaggctgttgaaggcgggacgccaggtgcgagagcccggccaggacctggtggtgctgcccctgtccatcaccaccgacttcatcccttccttccgcctggtggcgtactacacgctgatcggtgccagcggccagagggaggtggtggccgactccgtgtgggtggacgtcaaggactcctgcgtgggctcgctggtggtaaaaagcggccagtcagaagaccggcagcctgtacctgggcagcagatgaccctgaagatagagggtgaccacggggcccgggtggtactggtggccgtggacaagggcgtgttcgtgctgaataagaagaacaaactgacgcagagtaagatctgggacgtggtggagaaggcagacatcggctgcaccccgggcagtgggaaggattacgccggtgtcttctccgacgcagggctgaccttcacgagcagcagtggccagcagaccgcccagagggcagaacttcagtgcccgcagccagccgcccgccgacgccgttccgtgcagctcacggagaagcgaatggacaaagtcggcaagtaccccaaggagctgcgcaagtgctgcgaggacggcatgcgggagaaccccatgaggttctcgtgccagcgccggacccgtttcatctccctgggcgaggcgtgcaagaaggtcttcctggactgctgcaactacatcacagagctgcggcggcagcacgcgcgggccagccacctgggcctggccaggagtaacctggatgaggacatcattgcagaagagaacatcgtttcccgaagtgagttcccagagagctggctgtggaacgttgaggacttgaaagagccaccgaaaaatggaatctctacgaagctcatgaatatatttttgaaagactccatcaccacgtgggagattctggctgtgagcatgtcggacaagaaagggatctgtgtggcagaccccttcgaggtcacagtaatgcaggacttcttcatcgacctgcggctaccctactctgttgttcgaaacgagcaggtggaaatccgagccgttctctacaattaccggcagaaccaagagctcaaggtgagggtggaactactccacaatccagccttctgcagcctggccaccaccaagaggcgtcaccagcagaccgtaaccatcccccccaagtcctcgttgtccgttccatatgtcatcgtgccgctaaagaccggcctgcaggaagtggaagtcaaggctgctgtctaccatcatttcatcagtgacggtgtcaggaagtccctgaaggtcgtgccggaaggaatcagaatgaacaaaactgtggctgttcgcaccctggatccagaacgcctgggccgtgaaggagtgcagaaagaggacatcccacctgcagacctcagtgaccaagtcccggacaccgagtctgagaccagaattctcctgcaagggaccccagtggcccagatgacagaggatgccgtcgacgcggaacggctgaagcacctcattgtgaccccctcgggctgcggggaacagaacatgatcggcatgacgcccacggtcatcgctgtgcattacctggatgaaacggagcagtgggagaagttcggcctagagaagcggcagggggccttggagctcatcaagaaggggtacacccagcagctggccttcagacaacccagctctgcctttgcggccttcgtgaaacgggcacccagcacctggctgaccgcctacgtggtcaaggtcttctctctggctgtcaacctcatcgccatcgactcccaagtcctctgcggggctgttaaatggctgatcctggagaagcagaagcccgacggggtcttccaggaggatgcgcccgtgatacaccaagaaatgattggtggattacggaacaacaacgagaaagacatggccctcacggcctttgttctcatctcgctgcaggaggctaaagatatttgcgaggagcaggtcaacagcctgccaggcagcatcactaaagcaggagacttccttgaagccaactacatgaacctacagagatcctacactgtggccattgctggctatgctctggcccagatgggcaggctgaaggggcctcttcttaacaaatttctgaccacagccaaagataagaaccgctgggaggaccctggtaagcagctctacaacgtggaggccacatcctatgccctcttggccctactgcagctaaaagactttgactttgtgcctcccgtcgtgcgttggctcaatgaacagagatactacggtggtggctatggctctacccaggccaccttcatggtgttccaagccttggctcaataccaaaaggacgcccctgaccaccaggaactgaaccttgatgtgtccctccaactgcccagccgcagctccaagatcacccaccgtatccactgggaatctgccagcctcctgcgatcagaagagaccaaggaaaatgagggtttcacagtcacagctgaaggaaaaggccaaggcaccttgtcggtggtgacaatgtaccatgctaaggccaaagatcaactcacctgtaataaattcgacctcaaggtcaccataaaaccagcaccggaaacagaaaagaggcctcaggatgccaagaacactatgatccttgagatctgtaccaggtaccggggagaccaggatgccactatgtctatattggacatatccatgatgactggctttgctccagacacagatgacctgaagcagctggccaatggtgttgacagatacatctccaagtatgagctggacaaagccttctccgataggaacaccctcatcatctacctggacaaggtctcacactctgaggatgactgtctagctttcaaagttcaccaatactttaatgtagagcttatccagcctggagcagtcaaggtctacgcctattacaacctggaggaaagctgtacccggttctaccatccggaaaaggaggatggaaagctgaacaagctctgccgtgatgaactgtgccgctgtgctgaggagaattgcttcatacaaaagtcggatgacaaggtcaccctggaagaacggctggacaaggcctgtgagccaggagtggactatgtgtacaagacccgactggtcaaggttcagctgtccaatgactttgacgagtacatcatggccattgagcagaccatcaagtcaggctcggatgaggtgcaggttggacagcagcgcacgttcatcagccccatcaagtgcagagaagccctgaagctggaggagaagaaacactacctcatgtggggtctctcctccgatttctggggagagaagcccaacctcagctacatcatcgggaaggacacttgggtggagcactggcccgaggaggacgaatgccaagacgaagagaaccagaaacaatgccaggacctcggcgccttcaccgagagcatggttgtctttgggtgccccaactgaccacacccccattcccccactccagataaagcttcagttatatctca

SEQ ID NO: 2577 - DNA, 1258 bp, Homo sapiens; identical to SEQ ID NO: 2444

SEQ ID NO: 2578 - DNA, 4001 bp, Homo sapiens
aggcatcagcaatctatcagggaacggcggtggccggtgcggcgtgttcggtggcggctctggccgctcaggcgcctgcggctgggtgagcgcacgcgaggcggcgaggcggcagcgtgtttctaggtcgtggcgtcgggcttccggagctttggcggcagctaggggaggatggcggagtcttcggataagctctatcgagtcgagtacgccaagagcgggcgcgcctcttgcaagaaatgcagcgagagcatccccaaggactcgctccggatggccatcatggtgcagtcgcccatgtttgatggaaaagtcccacactggtaccacttctcctgcttctggaaggtgggccactccatccggcaccctgacgttgaggtggatgggttctctgagcttcggtgggatgaccagcagaaagtcaagaagacagcggaagctggaggagtgacaggcaaaggccaggatggaattggtagcaaggcagagaagactctgggtgactttgcagcagagtatgccaagtccaacagaagtacgtgcaaggggtgtatggagaagatagaaaagggccaggtgcgcctgtccaagaagatggtggacccggagaagccacagctaggcatgattgaccgctggtaccatccaggctgctttgtcaagaacagggaggagctgggtttccggcccgagtacagtgcgagtcagctcaagggcttcagcctccttgctacagaggataaagaagccctgaagaagcagctcccaggagtcaagagtgaaggaaagagaaaaggcgatgaggtggatggagtggatgaagtggcgaagaagaaatctaaaaaagaaaaagacaaggatagtaagcttgaaaaagccctaaaggctcagaacgacctgatctggaacatcaaggacgagctaaagaaagtgtgttcaactaatgacctgaaggagctactcatcttcaacaagcagcaagtgccttctggggagtcggcgatcttggaccgagtagctgatggcatggtgttcggtgccctccttccctgcgaggaatgctcgggtcagctggtcttcaagagcgatgcctattactgcactggggacgtcactgcctggaccaagtgtatggtcaagacacagacacccaaccggaaggagtgggtaaccccaaaggaattccgagaaatctcttacctcaagaaattgaaggttaaaaaacaggaccgtatattccccccagaaaccagcgcctccgtggcggccacgcctccgccctccacagcctcggctcctgctgctgtgaactcctctgcttcagcagataagccattatccaacatgaagatcctgactctcgggaagctgtcccggaacaaggatgaagtgaaggccatgattgagaaactcggggggaagttgacggggacggccaacaaggcttccctgtgcatcagcaccaaaaaggaggtggaaaagatgaataagaagatggaggaagtaaaggaagccaacatccgagttgtgtctgaggacttcctccaggacgtctccgcctccaccaagagccttcaggagttgttcttagcgcacatcttgtccccttggggggcagaggtgaaggcagagcctgttgaagttgtggccccaagagggaagtcaggggctgcgctctccaaaaaaagcaagggccaggtcaaggaggaaggtatcaacaaatctgaaaagagaatgaaattaactcttaaaggaggagcagctgtggatcctgattctggactggaacactctgcgcatgtcctggagaaaggtgggaaggtcttcagtgccacccttggcctggtggacatcgttaaaggaaccaactcctactacaagctgcagcttctggaggacgacaaggaaaacaggtattggatattcaggtcctggggccgtgtgggtacggtgatcggtagcaacaaactggaacagatgccgtccaaggaggatgccattgagcacttcatgaaattatatgaagaaaaaaccgggaacgcttggcactccaaaaatttcacgaagtatcccaaaaagttctaccccctggagattgactatggccaggatgaagaggcagtgaagaagctgacagtaaatcctggcaccaagtccaagctccccaagccagttcaggacctcatcaagatgatctttgatgtggaaagtatgaagaaagccatggtggagtatgagatcgaccttcagaagatgcccttggggaagctgagcaaaaggcagatccaggccgcatactccatcctcagtgaggtccagcaggcggtgtctcagggcagcagcgactctcagatcctggatctctcaaatcgcttttacaccctgatcccccacgactttgggatgaagaagcctccgctcctgaacaatgcagacagtgtgcaggccaaggtggaaatgcttgacaacctgctggacatcgaggtggcctacagtctgctcaggggagggtctgatgatagcagcaaggatcccatcgatgtcaactatgagaagctcaaaactgacattaaggtggttgacagagattctgaagaagccgagatcatcaggaagtatgttaagaacactcatgcaaccacacacaatgcgtatgacttggaagtcatcgatatctttaagatagagcgtgaaggcgaatgccagcgttacaagccctttaagcagcttcataaccgaagattgctgtggcacgggtccaggaccaccaactttgctgggatcctgtcccagggtcttcggatagccccgcctgaagcgcccgtgacaggctacatgtttggtaaagggatctatttcgctgacatggtctccaagagtgccaactactgccatacgtctcagggagacccaataggcttaatcctgttgggagaagttgcccttggaaacatgtatgaactgaagcacgcttcacatatcagcaagttacccaagggcaagcacagtgtcaaaggtttgggcaaaactacccctgatccttcagctaacattagtctggatggtgtagacgttcctcttgggaccgggatttcatctggtgtgaatgacacctctctactatataacgagtacattgtctatgatattgctcaggtaaatctgaagtatctgctgaaactgaaattcaattttaagacctccctgtggtaattgggagaggtagccgagtcacacccggtggctctggtatgaattcacccgaagcgcttctgcaccaactcacctggccgctaagttgctgatgggtagtacctgtactaaaccacctcagaaaggattttacagaaacgtgttaaaggttttctctaacttctcaagtcccttgttttgtgttgtgtctgtggggaggggttgttttggggttgtttttgttttttcttgccaggtagataaaactgacatagagaaaaggctggagagagattctgttgcatagactagtcctatggaaaaaaccaagcttcgttagaatgtctgccttactggtttccccagggaaggaaaaatacacttccacccttttttctaagtgttcgtctttagttttgattttggaaagatgttaagcatttatttttagttaaaaataaaaactaatttcatactatttagattttcttttttatcttgcacttattgtcccctttttagttttttttgtttgcctcttgtggtgaggggtgtgggaagaccaaaggaaggaacgctaacaatttctcatacttagaaacaaaaagagctttccttctccaggaatactgaacatgggagctcttgaaatatgtagtattaaaagttgcatttgaaattcttgactttcttatgggcacttttgtcttccaaattaaaactctaccacaaatatacttacccaagggctaatagtaatactcgattaaaaatgcagatgccttctctaaaaaaaaaaaaaaaaa

SEQ ID NO: 2579 - DNA, 1507 bp, Homo sapiens
tgggcggcggctgaggcgcgtgctctcgcgtggtcgctgggtctgcgtcttcccgagccagtgtgctgagctctccgcgtcgcctctgtcgcccgcgcctggcctaccgcggcactcccggctgcacgctctgcttggcctcgccatgccggtggacctcagcaagtggtccgggcccttgagcctgcaagaagtggacgagcagccgcagcacccgctgcatgtcacctacgccggggcggcggtggacgagctgggcaaagtgctgacgcccacccaggttaagaatagacccaccagcatttcgtgggatggtcttgattcagggaagctctacaccttggtcctgacagacccggatgctcccagcaggaaggatcccaaatacagagaatggcatcatttcctggtggtcaacatgaagggcaatgacatcagcagtggcacagtcctctccgattatgtgggctcggggcctcccaagggcacaggcctccaccgctatgtctggctggtttacgagcaggacaggccgctaaagtgtgacgagcccatcctcagcaaccgatctggagaccaccgtggcaaattcaaggtggcgtccttccgtaaaaagtatgagctcagggccccggtggctggcacgtgttaccaggccgagtgggatgactatgtgcccaaactgtacgagcagctgtctgggaagtagggggttagcttggggacctgaactgtcctggaggccccaagccatgttccccagttcagtgttgcatgtataatagatttctcctcttcctgccccccttggcatgggtgagacctgaccagtcagatggtagttgagggtgacttttcctgctgcctggcctttataattttactcactcactctgatttatgttttgatcaaatttgaacttcattttggggggtattttggtactgtgatggggtcatcaaattattaatctgaaaatagcaacccagaatgtaaaaaagaaaaaactggggggaaaaagaccaggtctacagtgatagagcaaagcatcaaagaatctttaagggaggtttaaaaaaaaaaaaaaaaaaaaagattggttgcctctgcctttgtgatcctgagtccagaatggtacacaatgtgattttatggtgatgtcactcacctagacaaccagaggctggcattgaggctaacctccaacacagtgcatctcagatgcctcagtaggcatcagtatgtcactctggtccctttaaagagcaatcctggaagaagcaggagggagggtggctttgctgttgttgggacatggcaatctagaccggtagcagcgctcgctgacagcttgggaggaaacctgagatctgtgttttttaaattgatcgttcttcatgggggtaagaaaagctggtctggagttgctgaatgttgcattaattgtgctgtttgcttgtagttgaataaaaatagaaacctgaatgaagaaaaaaaaaaaaaaaa

SEQ ID NO: 2580 - DNA, 3482 bp, Homo sapiens
cattggctccgaggacttaggacctgttagcttggttgggcgactggcaaatccttccttccccggggtagaagtccagggtgagaaattggttccgaactcaaaggaacccagtgccgggccacagccgggtcacgtggccggcggccccccatgacgtgctggctgcggggcgtcacggcgacgttcgggcgacctgccgagtggccaggctacctcagtcacctgtgtggtcgcagtgctgccatggacctgggacccatgcgcaagagttaccgcggggaccgagaggcatttgaggagactcatctgacctcccttgacccagtgaaacagtttgctgcctggtttgaggaggctgttcagtgtcctgacataggggaagccaatgccatgtgtctggctacctgcaccagagatggaaaaccctctgctcgcatgttgctgctgaagggcttcgggaaagatggcttccgcttcttcactaacttcgagagtcgaaaaggaaaagagctggactctaatccctttgcttcccttgtcttctactgggagccacttaaccgtcaggtgcgtgtggaaggccctgtgaagaaactgcctgaggaggaggctgagtgctacttccactcccgccccaagagcagccagattggggctgtggtcagccaccagagttctgtgatccctgatcgggagtatctgagaaagaaaaatgaggaactggaacagctctaccaggatcaagaggtgcccaagccaaaatcctggggtggctatgtcctgtaccctcaggtgatggagttctggcaaggtcaaaccaaccgcctgcatgaccggatagtctttcggcggggcctacccacaggagattcccctttggggcccatgacccaccgcggggaggaagactggctctatgagagacttgcaccttaactctgggacctgctggcccagagtggagctagggctaggtgtcaagagagggtgtgggattgggacccaggcccttctttctaaactcaacccatttccctccctaccccttatcttcaggactcttcagagctaatcctctaagttctctgtactcagttggttctcagttagctggtcaagtggagtgtaatggtggcgtagagaatcacaaatggaaaataattccataattatttttttgaccttgcctatgattgattaggatagctccctctaggggtagcagccggtgtgactccctttctggtgacagacagggccccagcagccctgtctgttaccatgtgagtcatactggccaaagcttagtcctagcatatgcacctgagccaacctggccaatcagattgttttgtcaataatttgaaatttgaactggagagatccagaaccttgggagtcattaaagccaagtcattcatagcagccaggaaacaataggaaccaaaagcctctgcctgctgctattgcaattcccaggatctctccttccctggatccctccctcccaggtctgggctgtgcagttcctccccctgccttaaaacaccccactatctctgtaaagtctctctctctcttttttttttttttacttaatctagctagaatctatttctgttgattacaacttaactaactcatttacggataggacttttttttttctttttttcttttttcttttcttttttttttttgagatggagtctcactctgtcacccaggctggagtgcagtggtgtgatcttggctcactgcaacctctgcctcccaggttcaagcaattctcctgcctcagcctcccaagtagctgggactacaggcacacgccaccacacccaactaatttttgtatttttagtagagatggggtttcaccatgttggccaggattgtctccatctcttgaccttgtgatccacccacctcagcctcccaaagtgctgggattacaggcatgagccaccacacccagcgagacggggtttcattatgttggccaggctggtctccaactcctgacctaaagtgatctgcccgccttggcctcccaaagtgctgggattacagacatgagccaccacgcttggccgggatagtatatttttatagcacttcccctactgattgctgccttctctgtggctacaagggacccacagaattacagggaagttacagggaagcaggtttcatctcaatattgggagagatttcaaacaatcacacctgcctgagaaggagtgggctgtcactaggaatttttattcccagtccgtcaggaattttgtagaagggcttcatgtgctggtaccaataggacaggaagattttaatcagctttactatctatgtttttttatggaaactgtgtgtatgtatacatacattttccaaaaagaaaaattaaatgattatagagattatgtttttcagactactcacgtatctgcttttcttactccccacctctgctgataattcctagttcattggtttttcccccacactggaattacctggggagcttaaaaaaccctgatgcctgggtcccaccctcagagatgattgaaccagcctggccagcatggcaaaaccctgtctctactatgatatgaatgcagcctgggcactgggaaatttaaaaactccccagataattctgtgcagccaaggttgagacctcctagtctagagctttgctatacacagggtggtccacaagccaggagcatcagcatcacttggcagcgccttagagattcagaccccagacccactgaatctgaccctgcattttcactagaccccaggtgatcagctgcactagactcaacctctaaaccaagacctcccaccctcacagtctatgatcctttagtgaccctcagctgagtcctgtgctgaactgtgtttgttctccttgagcacatgcccgctaaccagggacagactggatgagcaagcaacctgctggctatggagaagagccaggctgggtaaatgtttgctgtgactaagccaggatcaaagaactgcctgttgcttgcactggctggcactgagcttgccactctgtgaactgtgcttccttcccctgcatggacctgtgcctcagtcactattatccgcaggccttctccaagggcagccctctccttgtttatccctcttaagcctgcgtgcaggaaggcacattaaccctgtggccccctgcaggcaggagggtgttgggtgcccttacctaccttgccctttttcttgtaccgtaggctgtgccgtttatgagtaagtgatgtgtgtctgtgtgtgtgtctagaagtgctgcactcaccttgtgttattggaggttgtgtaaccccctagctttgagcctggtctcagatgttccttttccgttctctgtccagccgttaccgcccccagtctgtaataaaagcctatcagccgtgcactttaaaaaaaaaaaaaaaaaa

SEQ ID NO: 2581 - DNA, 2373 bp, Homo sapiens
agagcacactgtgggacgcacgtgcttctgattaaaggaatctcagatctcaattacgcttccagtgtttgggtatagaaatagcttccacccatcatgtctcagccatgggctgttggtcagttcatgtggctcctggttctggtgtgtatgttgggggcgggggtctctccatggtggtgacctgcagtgatgccaggcagggccagagccacacagccaggaaagggaggcctttttggccgcacagccagtcccttcagtcgtgactacaggtcttgttttttccgctccgatgtgtccttagccagttcttggctccggttctgtagggacaggcactgaatctgcgcgcctcaaaacagcagcttcccttccgggggagggcatccaccctctcaggggatcctgcaggtggcccatttcctgcaggtgagaactcggaagggctgatgtcgtcatcagaggcctaagggcagctgagagttggataaaaccgtttccaaggaggaggctgagtaacccagttcaggacagccaagcgcattaggcttgattggggaaggtggcaggtggagttgggaggttgggactctccatcttttgcaccacggatgcctttctgtcgctgtctcactctggggcaggatcaagtctgctctctggagtggggctgcctgcagtgcagctctgcacacctgaacgtgttctttgtcacttgtttggaaatgatgtgattgaagatttcagagaggtcattggaggcttttctgtgccggcactgaatgttcatttgcatgaggaagttgcaaacgacttctgcaggctgagattcaaggcaggtggtattggggtccctcagcccacctgggccgtgacctcaagtgtccactgctgagtgtgagtggctttgcaggcctggtggtgggagagcctcaggctccctccttcttcgttcctgaccatgccctgggccccttcagtctgcctgcggctctgtggcatccctgccctgacactgggcacctgtgcccctagcaagcccacctggcacacgaggagggaggggtgggtggccatgtccttcctctagccacatgccctgctggccgctccattctgagctttgtgcagaaccgggtctgagctggagatttttctctgagaacctgcagttgtgctgcagccgcacgcaagggcccttcagccgctggctctggcttccctgactcctcagggcgtgttcacccccaggctttctcacctgcacacggttaggccattttcagtgctcgtgggcagtcacggacagcagcagaaactcctcagcccctttgttacttcagaacgcctgcccacatgcatcttctgagctcgtgttgtcctcatggccgtggggtcttgggtgcgaacaggagatgctgagctgtggtccaccgtccaaggtgctgcagaaagcagctaggctcttttaggatgtttctattctggttgctgccttcgtggtgtaacttttaagaacacttacgggaatgtgctcatagaaccatcacctgtcctgagaataaaactcctggaatcatgatcaagtccagtgttaacgtggcccaacctgtctgtacttctggggagagaccaggaacatcactggactcctcatccccgtaattatttagagaagatgcaagcagcagatagtctccatgcggctggtactttttttgttgttttttgagacagggtcttgctctgtcacctgggctggagtgcagagcggcgatcatggctccctgaggcctcaacctactaggctcaagctgtctgcccgccttagcctcccaagtagctgggaccacaggcacccaccaccaccatgcttggctaacttgtttttgtagagatggagttttgccatgttgctcaggttggtctcgaactcccgatctcaggtgatccacccgcctcggcctcccaaagtgctgggattacaggcgtgagcccctgcgccccagccttggggcctgtctttgaatgggaatgagactgtgcaaaccgtggactaccctgtgtcacccacagctcagtggcctgcctgccggccctcaggggctgctgaccgggagaccagccagagcacgagggggtcagggctgtgtgggttttggcctgattctgcatttggttgtttctgggggccatgtagcctgcctgcattaggaaagcgctgtgccatctgatcatgagcacctctgcaccccctggtaaggtgaccttgcagcaggagctgtgccctgcctgggtaggcacccactaggtaggaccggagcaatcctggcagccgccacctgcacccgtgcacttgtttctcctcac

SEQ ID NO: 2582 - DNA, 1603 bp, Homo sapiens
cgggacggccgcgggaaaaggcgcgcggaaggggtcctgccaccgcgccacttggcctgcctccgtcccgccgcgccacttggcctgcctccgtcccgccgcgccacttcgcctgcctccgtcccccgcccgccgcgccatgcctgtggccggctcggagctgccgcgccggcccttgccccccgccgcacaggagcgggacgccgagccgcgtccgccgcacggggagctgcagtacctggggcagatccaacacatcctccgctgcggcgtcaggaaggacgaccgcacgggcaccggcaccctgtcggtattcggcatgcaggcgcgctacagcctgagagatgaattccctctgctgacaaccaaacgtgtgttctggaagggtgttttggaggagttgctgtggtttatcaagggatccacaaatgctaaagagctgtcttccaagggagtgaaaatctgggatgccaatggatcccgagactttttggacagcctgggattctccaccagagaagaaggggacttgggcccagtttatggcttccagtggaggcattttggggcagaatacagagatatggaatcagattattcaggacagggagttgaccaactgcaaagagtgattgacaccatcaaaaccaaccctgacgacagaagaatcatcatgtgcgcttggaatccaagagatcttcctctgatggcgctgcctccatgccatgccctctgccagttctatgtggtgaacagtgagctgtcctgccagctgtaccagagatcgggagacatgggcctcggtgtgcctttcaacatcgccagctacgccctgctcacgtacatgattgcgcacatcacgggcctgaagccaggtgactttatacacactttgggagatgcacatatttacctgaatcacatcgagccactgaaaattcagcttcagcgagaacccagacctttcccaaagctcaggattcttcgaaaagttgagaaaattgatgacttcaaagctgaagactttcagattgaagggtacaatccgcatccaactattaaaatggaaatggctgtttagggtgctttcaaaggagctcgaaggatattgtcagtctttaggggttgggctggatgccgaggtaaaagttctttttgctctaaaagaaaaaggaactaggtcaaaaatctgtccgtgacctatcagttattaatttttaaggatgttgccactggcaaatgtaactgtgccagttctttccataataaaaggctttgagttaactcactgagggtatctgacaatgctgaggttatgaacaaagtgaggagaatgaaatgtatgtgctcttagcaaaaacatgtatgtgcatttcaatcccacgtacttataaagaaggttggtgaatttcacaagctatttttggaatatttttagaatattttaagaatttcacaagctattccctcaaatctgagggagctgagtaacaccatcgatcatgatgtagagtgtggttatgaactttaaagttatagttgttttatatgttgctataataaagaagtgttctgcattcgtcaaaaaaaaaaaaaaaaaaaa

SEQ ID NO: 2583 - DNA, 1675 bp, Homo sapiens; identical to SEQ ID NO: 1541

SEQ ID NO: 2584 - DNA, 6471 bp, Homo sapiens
gcacaaaccctagtgggtttggttgcacggcggctttggcgcattttcggctggtttgattcatccattttgaagagacgggggagcggggggctcgtctgttccaggagccctgaaccaaagagcagcggagtttgagaagccagcagctcggggttcggcagcagcggtcccatcggctgaagttcggggggggtggggcgccgagcgcgcggggtggggggggtcctggtctttggcttctcgactcggtcctgtttcgacagcgaacatgtcgcggcctgtcagaaataggaaggttgttgattactcacagtttcaggaatctgatgatgcagatgaagattatggaagagattcgggccctcccactaagaaaattcgatcatctccccgagaagctaaaaataagaggcgatctggaaagaattcacaggaagatagtgaggactcagaagacaaagatgtgaagaccaagaaggatgattctcactcagcagaggatagtgaagatgaaaaagaagatcataaaaatgtgcgccaacaacggcaggcggcatctaaagcagcttctaaacagagagagatgctcatggaagatgtgggcagtgaggaagaacaagaagaggaggatgaggcaccattccaggagaaagattccggcagcgatgaagatttcctaatggaagatgatgacgatagtgactatggcagttcgaaaaagaaaaacaaaaagatggttaagaagtccaaacctgaaagaaaagaaaagaaaatgcccaaacccagactaaaggctacagtgacgccaagtccagtgaaaggcaaagggaaagtgggtcgccccacagcttcaaaggcatcaaaggaaaagactccttctcccaaagaagaagatgaggaaccggaaagcccgccagaaaagaaaacatctacaagccccccacccgagaaatctggggatgaagggtctgaagatgaagccccttctggggaggattaaaagtgatgatggtctggggagagattttattaaaaaaaaaaagaaaaaaaaagaaaaaagagggaggaaaaaaaagaacctacttaagatagaacatggttttggctatggcttgactcatgggctttcagtgcttttttccatttgttgaaagtaacatttctctctctctctctttttttttttttttttttaaagcaaaccattgtatgtgtaagtgtttaagttacctttttgtctattggtctctttgccagccctcccctttcccaatgaaagccatgtcaaattaatcactggattgactgcttcatctttttatttttaatgaaaggtgtaccacggttgtaaagcaataagatttgagatgaacactattgaaacttcgctttttgctaaaaaatagcaagttgaatagtaatcaaaaaacatagaaagattttagttcaaaatgattgctcctttctctacctggacttttaaaaaatcaattgtcatctaatatgagtttatttgtctatagacacaagtatcaatgtctaaaaaaaatcatgactttaaacttccaccgatgaggcaggtaggagataaagatgaattctgaactgttactaaaagtactcattttttaccttgtagggagggtgggcaatggggttacctgaccttatttgagggtatgggctttcttttttatttcatcacttgttatctcaaagagactcggagccagtgatccttttatcctgctacagtctttagggagctaaaaaaaaaaaaaaagcaggggctgccaaaactcttgatttcatatttccttctctaaatatatatgtatcctgttttttggataaaattttaccaagaatccaaaaaaaaaaaaaccctagaatttaatcaacaagatcagtctacaggtcacagtggatttcttttcaaactgacaatgtttaggttttaagcaaataaagttccagttaatgtgaaactcagtcacaaagagttgagatttttcctttatgaaatagaattgacattcttttatgctataaatgtgcattcaggtcccattaaccatgctctgcttttatttggggatagaacattttctttttcatatcccgatcttcccatttcttcatagaaatgtgataagaagtacatccctgtgatcctgctgcttcgtagagcaccactgcacaccctaccccgagtgccaaccacctctgctataggacactattttcctggccctattcttcacttacttcccatcctgtccttgactaggaatatgttaaatgctgctcccatacaattcagttagctcttgtctttttatttggtccaacccctgctttactgctcatgctgcttaaagcaggagggactagagaaacaaggcattttaggaggcctgtgtgcagttgaaaaccgacttttacacgccttataaaagcagtcaggagatagatccgtaggtttgatccttcacatctaataccaggcgctaatgggaacaaggtttaaagggtcctggtatgctaataaattgaaaaattagtgaaatttaaacttctgcctttttttcctgccttttaatctagatttgcttcctcaatatcctactttgtggtttactaggaacatgcttactctgatctttttttaaaaaacacacagtggcagagtcatttcactattgcactgtgtgttaaagaatgaataaggagttttcagttacatggccaaaaatacaggacttgaacataaatagcagttggatcattctctttcatgacggttaaattcagaggtgtgaactttgtaatgagggtgttaaagattaatctatttgcctaaatgggtttgttcaggtatccatttttaacaaagaagtttgtgttcatatagtaaaagacctatcagtgtttccaccatgcacttctattttttaggagtttataattttaagtcttacattcctagtaacatttgggcttttcttaggttatgtttcgtgaagatttggggggagggctcttttaaaacttcagcctcagttgtttaacagtctctttaatatattaatctgcactaacatctctgtgatatatgcacatattttagaggtaatcatgtcttctagattacttgtgtgcatttgattgggcttcttgtttagggtcccttttaaaattaattcattagattgaaaaatgtattctatatttctgatagactggacagaaggatctgtgtccccaagtgagacaggctctgaataacctttgttttctccactttttattgatgatttaaaacactctagtcttcccctcaaatcatgcatgcaaataggaggacagtggtggtgactcaactggatacaggtgctcaatagtcaggcttgatagtgatgtcaggacgcattacaagctgtaagccgatactgactggccattggcaccatccttgactaaccttcctctttttctctagtgtgcctatggtgaaatggcaatagcattcactgtcgtattttgcagtgctcaggaagtgggacgttaactttgaaggtgcttgtttgtattagctctgctaggtttacctctacaacgtagatttcagcagctatgctgactgacactacattctagttcttaagattttttttccagatccccccttccccagctagacatacgtagcatactttcatcttattcagtctttctgtaacctgctgctgcttttagtcctcctcacctcagatcggaatcaatggagtgggcccagaggatacattttaattccagtaatggtaggtagatttgtcctgctttctaaaacatctcctcatttcatatttccactccatattgattccataagggaaaattaatgggtgtttcctcctttagggaggtaatgcaaagagtgtggacatcttctaatcttgaggaacagtagttgatttcccttgaaggagcttacatattgactgttttcacaataacctgtttgccccagttcaatcctcattttaatacttaatttggtactggctcaaatagcattttcttacagataacaaatcaagagtgaaatttgaggttatactccagtaaagtttttaacacttgtgaatatggtcagctagactaaacttgactcttttttttaatggcttttttatctgtgaacattcagataagtggattttcaagtactggttggggatgggaatcgtgcttttctttaaacttcagtttacgagatgctttgagagcgttaggcaaaagcagaaataaatatcaggagcaacggggaaagctttataaaagatcatggtggccactgttgcagctttgaagaatgagtgctggcttgaacagttctttgcctgcatcattggtagctgcactgaaaggaaaaaactttcaccttaagaatttgaaaaggaagaaacctgggctctggtcttcatggcatttagactgagatgcttaaacagaacagaagtaatacgcatttcctgccataggatagggaaaatgtaacaagctggttgctcttgaggttagaaaattgtctgtttctctgtggatgaagctggatttacttgaaaatggagagttggcttattgtttgaatattgggacatcaagctatctatagccaagtttcagtcgcaaccagttttccctttgtctggggtaaattcgatacaaaatgattctttttgaatcctgaatccataaattacacttttttttttcaaattcacaaaattcacagtggtgctgactgtgtaataaccactattgggaaacatcccgtaaacctgcctgttgccatgccaatggagtgactgaactggtgacatctgtttgagcatgctttgtgtggctggtagaatgccaccgttgtgcatacactttgtacatcaggggtgaagggagggttttctagattattgggggagggtaaaattgggatttttttgttgttccttttttgatggggtgtgggggtatagtactcagcttatgccctaaaataacatgtataaaaacccctgaagtattgtgtgggtgtgtacgtgtgagtgtgtgtttgtatacatctggcaattaaagctttgtcttctggaacttagtgaattcttttctctttttcctccagaagtatttgttacaagatttgtaaataagagctctacttagtttgtttaccatgaacatgttgcagcaaaccttatgcatctaattcctacaaggttaaagaaaggcttttagacttgccaggttaagcaacagccaagttctcagtaattgtttgccttgatttatcttttagacttcattttgccagctctaaaactcccagtcttccttgattttagtccttaatcttttatgttctgagcaggaagggtaaaagacaggaacctgcttcactgtattaactagtccatgggctgagaccggggcatctcttttcttcatactgcaatgttgctagatacatgatcagacaccagagggttgggcattcttgcaataccttaacagtgctgaaatctgcagcatggtactaaggaagttaaagtttgaatgtaaccactttatttaaaaggtttttttctttaatttaaatgaaatggggttgaagtgaacatgattttgttgaccatgttcgtgaattacagatgcaacatgcattggtagaatcgtgtgatggtcttttgtgatacttaatttttacatatcccagtctctgtatgtatctgcatagacaaagaaaaaacaaactcctgctttgcttttattgaagggtttccaggactgcgtgtctgctcctgagctctgttttaagtatgtgtatcctttgcttgtattttgtattaaaaaaataagaaaaagaagcctttattgttgagcatgttggcattgtcccctttatttttttctctttttgggacatatgaagcaagttattctttttctgtatctttttttcttttgtaaactttttttttgttttgtttaaaaatggctttataaaagggcttttataacccagatgtgtgctctgtgtacttcttgtaataccttaaagcaaacacactaacttacacagctttgttaatcagctcccagttcagcctgactttgtgggaacttatttccctaataaattatttagaaactttaacagtgaccatccctgttgttggtaaaagataaacatgtcttggttcaaaagttaatacctcaggatggaatcaagaagcagtagacttaccagtttgattaattaagggagcactggactgggtgcgtaaggattcttaattagcattttttctcatgtttacatccaaggttatgaagtgttgtggaaagcaaagtttaacaatcatatataataaaagataatgtttatactcacagaaaaaaaaa

SEQ ID NO: 2585 - DNA, 3524 bp, Homo sapiens
ctgtcttacagctgatccggttcttgcggcggtgcgtgctggcgccggagagttccgcgcgtgtcctcgggctgtccgcggggaagctggtccgggagtgggcgcccgcccgcctgcctcgcgccttgcgcccccggcaccgcttccagaagggaaagtcgccgccgctcgcggtagacccgggcagcgcttccattccgcggagctggaaatagggatccagccatccgtgggtcaggaggaatggagactgtaccttccacatagattcacaagctgccctgcagtggccttggcttcaggaaaggagcattcagacgcttccgtcagcctcccaggatggcagcccctgacctggcccacggaggtcatgtttctagggactcagtctgccttcatgaagaacagacacaggcagcagggatggtggctggctggctgataaattgttaccaggacgcggtgacctttgacgacgtggctgtggacttcacccaggaggaatggactttactggacccatctcagagagacctctacagagatgtgatgctggaaaactacgagaacctggcctcagtagaatggcgacttaaaaccaaagggccagcacttcggcaggatagatcttggttcagagcatcaaatgagacacagacggcaagaagccacaatggagggcagctctgtgaccgcacgcagtgtggagaagctttcagtgaacactcaggcctcagcacacacgtgagaactcaaaatacaggagacagttgtgtgtctaatcattatgaaagggacttttttattccatgccagaaaaccttgttcaaaattggagagcagttttccgtgttgggtcagtgtggaaaagccttcagctctactccaaatgttgtttcccagcaagcatgcactcgggacagatctcttgactacagcagctgtggggaagtgttccttaatcagtcataccttcaggcacgtgcgggaagtcacaacggagaagaaacatggaaatggaagccgtgtgggaaagctctaactcactccatgggctgcgccacacctgttgaaatgcatgccgtcaggaatccccacgtatgtagggaatgtgggaaggcctttaggtacactgcctaccttactggtcgcgtgcaagtccaccctggggaaaagccctgtgaattggaagaatgtggaaaagcctcccctgtttcttccagcctaactcaacatgtaagaattcatgctgcagagaaaccctgtgaatgtaaagaatgcggaaaagccttcactggactctcaggtctttctaaacacgtccaaacagaccctggacagaagccctatgaatgtaaggactgtgggaaagcctgcggtgggttttatctactgaatgagcatggaaaaactcacacgagggagaagccctttgcatgtgtggtttgcggaaaatattttagaaattcctcatgccttaataatcatgttcgaattcacactggaataaaaccctatacatgcagctactgtgggaaggccttcactgtgcgctgtggccttactagacacgtacgaacacacacgggcgagaagccatacacgtgtaaggactgcgggaaagccttctgtacatcctcgggccttactgagcatgtaaggactcacactggagagaaaccatatgaatgtaaagattgtgggaaatccttcactgtttcttcaagcctgactgagcacgcgagaatccataccggagagaaaccctacgaatgtaagcagtgtggcaaagccttcacagggcgctcaggcctcactaaacacatgcggacacacaccggggagaagccctatgaatgtaaggactgtgggaaagcctacaatagggtttatctactgaatgagcatgtgaaaactcacacagaggagaagccctttatatgtacggtatgcaggaaatccttcagaaattcctcgtgcctgaataagcacattcagattcacactggaataaaaccttatgaatgtaaggactgtgggaaaacattcactgtttcttcgagcctaaccgagcacatacgaactcacactggagagaaaccttatgaatgtaaagtatgcggaaaggccttcaccacatcctcacaccttatcgtgcacataagaacccacaccggtgagaaaccctacatatgtaaggagtgtgggaaagcctttgcttcctcctcacaccttatcgaacacagaaggactcacacaggagagaaaccttacatatgtaacgagtgtgggaaagccttccgtgcctcctctcacctgcataaacatggaagaattcacactgggcagaaaccctataaatgtaaggaatgtgggaaagcatacaataggttttatctactaaaagaacatttaaaaacttacactgaagagcaggtttttgtatgtaaggactgtggaaaatcttttaagaattcctcatgccttaaccatcacactcaaattcacactgatgagaaacctttctaatgtaaagaatgtggggaagctgtcagctacactcattcacgttgaagacatgaaagacctctcgttctccagatgtccatgacttgaggaatgtggctaggcaatcagcatctcatcacaacccggcaggcaggaactcaccctggagccctatgcagcagacacagagaaagccctcagtgttctctaaggtcttgctgaatatggatggtatccagtagagagaactctattgatgtgtgatatgcagcagcattgttgctgttctgctcagtactttgatgatcccttgtgatctcacaatgaagaaaaaccttaggagggtgagaattgttgggaagtcattttttacattacatctttcctcaccctttagtaaacgtggtgattgacacttgaagtgttgtgaatgtatggaagatagcagtcgcttccctgtgttctaaaaccttgtgggctaacttgagacatgtctttctgggggttctgtagacgtattttgaatctttatgatgctgcactgatcattcttggagtgaggactctgttccctgtagaaatcctccagtctggttgctacagtgtccacgtcgcagcctggctaacagtaggccttgaggactcagatgtgatcctgtgtgagcagtgtaggctctggttggttagtcttgaggatccagatgtgattctttgagcagcgtaggctctggttggttagtcttgaggatccagatgtgattctgtgagcagtgtaagctctggttggttagtcttcaggatccagatgtgatcttgtgtgagcactgtaggctctggttggttagtcttgaggatccagatgtgattctgtgagcagtgtaggctctggttggttagtcttgaggatgcagatgtgattctgtgtgagcagcgtaggctctggttggttagtcttgaggatccagatgtgattctgtgagcagcataggctctggttggttagtcttgaggatcca

SEQ ID NO: 2586 - DNA, 3536 bp, Homo sapiens; identical to SEQ ID NO: 2429

SEQ ID NO: 2587 - DNA, 1286 bp, Homo sapiens
gtgtttgaaatgacaggctttttatttctcaggaacagccgagatgacctccagaggtttccagcgaagctgtaacaatccaccctgcagctctatgacagggaggagggcgaatcaaatccatcatcttacgccagacttcagccctgcgggagctgctgcctccaaagaaagcggggacctgggcggactgcgtctctcccccgtgtggagaacgtgacagatgtgaaggttgggctgacagacacacggcctgcagcagcccagccaaaaaaaacacaacaacaaaaaaactgtcctctgaggaggcacaggtgtgacagataaggaacctgcagctcagattcaacaggcacctgccaagtccacactcaggactgtgacagcctcaacaacatgaggtccagacacattcactgtggaaggctctgcccacgcgaacaaagctgtcagctctagcaaaagggacactgccttcttcctccctcacttctcacctggtaagcccgggaatcaaaacagcaaaaatgagcccccaaaaaagagagagagagagagaagcagccactgttaccagcagcacccgctgcacaggcagaagcacctctggtgccactttcaagacaaaacaagagcacagttgaaacatctaatttgaaaatgttgatctcctttcctaagacattgctaaggggcccacaggaaggctggtggcaccagggaataaaccctggaagtggtgcagccactctgggaccaggcagctccggccagaggcctcaatccatggcagccagctgctcgatggcacggcgcactttctccgcagtttcctcaaattctttcttcttattgttggtttcctttgccaattttgttcttggctctttctctgtccagtttcaaaaattcaccaagggttaattcttcaaactgcttcttgacagaaaggaaagcgcaaccggacgaatgctttttatgttcctctatggggtcgtcatctggctcccagccttccagctccttgaagcagaagaaacactgggccaagtctggctcgttctcagtggggcagtggatgaagccagcctcggccatccgctccggggtgcaggcgcagccctccaagaagggccagttcttgaatgtagagatgcggtggtccttgagaaagggctgccaggcagggggcaacgtcggggcacccatgccgccgccgccacctctgccaacgggtcccgcgattcaaatctggcggttaatggcgcgccgcggggcatgtcggg

SEQ ID NO: 2588 - DNA, 3683 bp, Homo sapiens; identical to SEQ ID NO: 476

SEQ ID NO: 2589 - DNA, 3191 bp, Homo sapiens; identical to SEQ ID NO: 2288

SEQ ID NO: 2590 - DNA, 1811 bp, Homo sapiens; identical to SEQ ID NO: 565

SEQ ID NO: 2591 - DNA, 2248 bp, Homo sapiens
tttttttatgtgtttgtttaaagatacatattaagcttgtagaccatagggacatacggagagtccattgctaatatctcactcagtattgtgaaattctatctcaccaccgtgaaactcttcagttttctaattgctttatcagcagggggtataaaaggtcatgaaagcaatttccacatgctgtggctccaggtctctgggtgtgaagcagagcaagcctggtttgtcctcctcctgtctccacacagacggcttctgcaggtttggtaatctacagtacactccttgcagggaaaaggtgatgagtcatcatggacttatttgaccactttttatgcatgcttagaggaaaacagaatactgttaagagattcatctgctagttattaagtaaagaaatatcacaataggccgggcgcagtggctcacacctgtaatcccagcattttgggaggccaaggtgggcggatcacctgaggtcaggagttcgagaccagcctagccaacatggtgaaaccccgtctctactaaaattataaaaaattagccgggtgtagtggtacacgcctgtagtcccagttacttgggaggctgaggcatgagaattgcttgaacccaggaagtggaggtggaggtgagccgaaattgtgccactgtactccagcctgcaacagagtgagacactgtcacacaaaaaaagaaagaaatatcacaatatgtcacaataggccgggcgcagtggctcacacctgcagtcccagcactttgggaggccaaggcagatggatcacctgaggtcaggagtttgagaccagcctggccaacgtgacaaaacccagtctactaaaaatacaaaaattagccaggcgtgatggtgggcacctgtaatcccagctactcaggaggctgagacatgagaatcgcttgaacccaggaggtggagattgcactgagctgagatcctgccactgggctccagcctgggtgacagaatgagactctgtctttaaaaaaaaaaaaaaaaaaaaaaaatcacaataagtcctagggtaaagatgggggtacagaaaacaattaaatagaacaaaaacaactgtttccttttcctgtgattcaagaagggcttagatcttctactcagcatccttttactaatgccctccattggctctcaccccaacatttccttttttatagcttattttgtaatgcctccttaattatcctttaatagaagccaccgctgataagctacctacactcatacagaagcattaatataatgccccagatgtactgtttcagggcaaaaaggaaaataatttccaacaaagtggtgtgtgtctcactgtcagatgcttgcacttacacacggaatcgctgtgcatccgacagaggctgattggcacatggggcacggggattgtcagctcaaacaccgtcagcagcgttgcccttggaaatgggatttcccagaacagtaaacgtgtctgtccttgatttacagagtagctacattcctaggaaatccagggtacattaaaactcaccatgttacccaggctggtctcgaactccaggcctcaagcaatcctcccacatcagcttcccagaattttgggattacaggcatgagccaccacacccagccagaatattttatttctgttagacacagagcgttcgttgactcgtctgggcgttagtgttaatattctgtacttgaagcaagcccaccaagcggctgaactgggtggataatggaaaatgtcctgtggatttgggagtgagacaaaccggcttgagtctaacctctcagttagtctaaggctccaagcttgaaagggttaaatgaagtactatatttgttttgtttcgttttcgttttgtttgaggctttgctctgttgcccaggctggagtgtagtggcacaatctctgctcactgcaacctccatctcccaggttcaggcgattctcttgcctcagcctccagagtagctgggattacaggtgcccgccaccacacccggctaagttttttttggtatttttagtagacacagggtttcaccatgttggctagactggtctcgaactcctgacctcaagtgatccacctgccttggcctcccaaagtgctgggagtataggtggtgagccaccacgcctggcctaaatgaagtaccacatgaccgaccgaccgacctggggaacatagcaagaccccatctctacaaaaatgt

SEQ ID NO: 2592 - DNA, 2047 bp, Homo sapiens
ggcggctccagagaggtttaaacactggccttggcggctgagggaggagggtgaagatgaggcaggggctgctggtgctggcgctggtgctggtgctggtgctagtgctggctgcagggtcccaggtgcaggagtggtaccccagggagtcccacgccctcaactggaacaagttttcagggttctggtacattctggccactgccactgatgcccagggattcttgccggccagggacaagaggaagctgggggcgtccgtggtaaaggtgaacaaagtgggccagctccgcgtgctcctcgccttcagacggttgaaggggtgccagtcccaggaggtgatcctgaggaaagacgggaagaagccggtgtttgggaacgcctgtgcatacgcggcgggcccgagggaaggacaggagggagtgaaaggggtgaaggccttccacgtgctgtccactgactacagctacggcttggtctacctccgcctggggcgtgcaacccaaaactacaagaacctgctgctcttccataggcagaatgtttcgagcttccagagtctgaaggaattcatggacgcttgtgacattctggggctctccaaggccgccgtcatcctcccgaaagacgcgtcccgtacacacaccatcctgccatgagagccagcgtcctctgctcttccctttcgacgcgtggtcctcccagacccgaggagcgttgttccagatgtcaagtggagaccacggcttgttgagaggtgtttggtgactctaggtcattgacagtgtgaaaatcaagtggctcaagggatcctttatgatcacagaaagatgggggaaggaggatacaggctgaccgggtggcgagatgtcagccaggccccttccccactgtcttctggagcacactgcaggctgctgctattccctgtctgctgtgaaacagaccacaggccggcccaacgcagtcctcgccgtgtgccttgcctctgccctccacgccgccgccaccctccgcgttcctttacatcctgcactttctcaggaagccgttcgcatatccacccaacatggaggagcccccatgacgtgccaggcagcgtgctggcccctgcggctgcgttagggaacagaatcggcaaacgcagtcccagagttgatgcctgatcaggagaagccaacttcagcagtgtggtcacctggatactcgagtatagaccctagatcacctggatactcgagtatagaccctagaagtgtatctaggcgcggccagggccccacaacagcaggtctgactcattccatccagggcagcatcagggagagcttcctgggggaagtggcatttgggctgacctgggaagggtggtgggtgttaagtcagtttgggtggggctggaggagcaggggtgcatccccagaacaggatgtgacttctgaaaagacatcagagtagagaaaatggtttctcaaggagattggggacgccagtatcagaatggcggcggggagagccacagaggagcaggagggggcccaccagaccacggcacctcgaaggctgcggtgaaggcttaggtctcactcaaggggtgatgacgggaggttgtctgagatgaaccccccaactgaatgaatggaccttcttctggccaaggggatcccaaagaaaccctgaacccgagtcctcagccatgacggggtaaggggtcagcccctccttctggcccgagaagagatcagagattggttctgggcagtccatggagaatttgctcagctggaccagtacacgcttctcctttcatgaatattcatgactcctcctgaagcttattgaacatctctatttggccatctccttcagcgtaaattcctgtcccctctgtccctcccctccaagtgtctgttccaggcttctggcctgaggctacgcttcctagcctgtcagaagggctgccctgctggctgcaatctcttatgagaaataaagctctcctgtgtgcaaaaaagtaaaaaaaaaaaaaaaaaaaaaaaaaaaaaaa

SEQ ID NO: 2593 - DNA, 651 bp, Homo sapiens; identical to SEQ ID NO: 60

SEQ ID NO: 2594 - DNA, 3415 bp, Homo sapiens
gtgctttccagccgcgagctgtcaggccgagtgtcaggccgggcaggtacgcggcgcgcgcccccggcgccccccgctccccgccgggacgccccgcgccgagccggaggccgcgtggacccgaaagccgctgggaaaagtttacccaaggtccagcctagcccctaggcaccatgtcggacagtgatctaggtgaggacgaaggcctcctctccctggcgggcaaaaggaagcgcagggggaacctgcccaaggagtcggtgaagatcctccgggactggctgtacttgcaccgctacaacgcctacccctcagagcaggagaagctgagcctttctggacagaccaacctgtcagtgctgcaaatatgtaactggttcatcaatgcccggcggcggcttctcccagacatgcttcggaaggatggcaaagaccctaatcagtttaccatttcccgccgcgggggtaaggcctcagatgtggccctcccccgtggcagcagcccctcagtgctggctgtgtctgtcccagcccccaccaatgtgctctccctgtctgtgtgctccatgccgcttcactcaggccagggggaaaagccagcagcccctttcccacgtggggagctggagtctcccaagcccctggtgacccctggtagcacacttactctgctgaccagggctgaggctggaagccccacaggtggactcttcaacacgccaccacccacacccccagagcaggacaaagaggacttcagcagcttccagctgctggtggaggtggcgctacagagggctgctgagatggagcttcagaagcagcaggacccatcactcccattactgcacactcccatccctttagtctctgaaaatccccagtaggcatctgccaagaagggtgctgaaggctccagccagctgtcctgggtttccgttttggttccctttcatacagagggttttctatggatcactgccaaacattgggatcatctcctctgtccagaggtcttcaacaggaagatgccagctggcaccactgcactgtgatgggggccctctcctctgctgactctgccgtttctccaggcctccgctcagtgatgagaccaagagatcggagacaagcatggtgctgctgcttctgctgcttctccagaaaatccctgggacacctttgttccagcctggtttcctgggctgggctcaggaaagctgccaaattcagtcctatgttgggtccaagctgcccctgtgctgtttctgtcaagccaggtgtggacattccaagttcatatgcgtgaacaaaagaaaagaggaacccagtggatgtaacagaaccgactccagttgaatgtttagatttttgctaaactgttttctttttcccttttttgctgtggtttgcattcacggcagtagttagcccaggtgtggggaacgagagtgcactgcatgatagcgttctggtgagctgggaaggacccaccactgccactgaggattgttttggaagaaaggaatatttttatcttggggaccagctaagtctctgcagtagtgtgaaattccaaatggttgttttatcattggtttggtttaccaaaaaaaaggcagggaaaaaaaaaaaaaacaaccgtatgagcgcattggcttgtctgccgcaggcacagaagggtagaaagccacagcagggggcagtccagcagactctgactcaactttctaggcacctagcagagaaagataagatcaaaaggtgtttggtttttcttttaatttttattgtagtttttttgggtgggtgggggaagtaaactagactgaagcgatggattttttttttcttttttttctttagtgtttttccctttgttcttgaacacttttgccctgcagcctcagttttgaattcttttagcaacttggattagaggggcccatatgtcagaagctcccagcacctcctacttgggagaaaagtgagccatctgctggtcaggaagtcctccagagaggcagcttttcccacaatggtggcaggaaactttggggaaagcaggaatggtgtccactgctgcggaggaactgccttcagagaaggtggggctggaaaagggttagaagcctcctagctgggattgtctttgtttcacctttctttaaattagaattacagaagcccctgcccagtgaacagataacgattggtcttatgctcctccctttcccccattttttcttttgctgttttgttttttgttttttgtttgtttgtttgtttttttgagacagagtcatgctctgtcacccgggctggagtgcagtggtgcgatctcagctcactgtaacctccgcctcccgggttcaagcaattatttgcctcagcctcccgagtagctgggattataggcacccgccaccatgtctggcttttagtagagacggggtttcaccatcttggccaggctggtcttggaactcctgacctcgtgagccaccacgcccagcctcttttgctgtttcattgctgacagtgttcaacaatatgccccatctttatatatcctaagaaacactaatcctaggttattgctagccaaaatatttttgtcctgagtagtgtcactgggccaaaagatagatcaggacgacagcctttagttttcctgaaatcaccaggtcaggcacaaggagaaaaggttcctggatactgactaacttgggtgggtctagccaggagaaagacagtaacatgtgttctgtactttctgggaagatccctgaagccatcacagaggctccccaacttctgagtcgcccatctgttgctgtgggagtgtgaacggatcgctgaaggagagggagctttgctctctctaggtgggcaagtttcctgggctctctgtgttgcctccctctggcttcttcctcccgtgccctctccccgtgtgccccagggggatcagggatcctcaccctcctgaggcccagtggggaagaatgaacatggcttcatccaggttaactgatgctgccatttgcccagcctcttccatcccagccctgtcagtgagcccaggtctggtgcaactgctgcaggatgcctgtagtagggaactctggaagtgtattgggctgaggtgggattttccctccccacagtgcactgagcaatggagggtggtgagggagccatgctgctgaattctggttggcatttccccattatgtaaaatggggtgttgggtagggcagactctgcttgggtttggttgtaagataaacctggaggagaagcacagttgtcccattgaattatttgagcaaaaactactgtaaataacttttttgtcttttgtcaaataaaatttttttttgtttttttaagcagaaacaaaaaaaaaaaa

SEQ ID NO: 2595 - DNA, 2443 bp, Homo sapiens
ggcggccccagtcagacgcaggcagccccaaagcctgaacaggcagggccagacccagcttcttcgcctccgccagcggggaccccgagctagagccgcagcgggacctgcccggcccccggctccagcgagcgagcggcgagcaggcggctcacagaggcctggccgcccacggaacccggggcccggcggccgccgccgcgatgtttccccgcgagaagacgtggaacatctcgttcgcgggctgcggcttcctcggcgtctactacgtcggcgtggcctcctgcctccgcgagcacgcgcccttcctggtggccaacgccacgcacatctacggcgcctcggccggggcgctcacggccacggcgctggtcaccggggtctgcctgggtgaggctggtgccaagttcattgaggtatctaaagaggcccggaagcggttcctgggccccctgcacccctccttcaacctggtaaagatcatccgcagtttcctgctgaaggtcctgcctgctgatagccatgagcatgccagtgggcgcctgggcatctccctgacccgcgtgtcagacggcgagaatgtcattatatcccacttcaactccaaggacgagctcatccaggccaatgtctgcagcggtttcatccccgtgtactgtgggctcatccctccctccctccagggggtgcgctacgtggatggtggcatttcagacaacctgccactctatgagcttaagaacaccatcacagtgtcccccttctcgggcgagagtgacatctgtccgcaggacagctccaccaacatccacgagctgcgggtcaccaacaccagcatccagttcaacctgcgcaacctctaccgcctctccaaggccctcttcccgccggagcccctggtgctgcgagagatgtgcaagcagggataccgggatggcctgcgctttctgcagcggaacggcctcctgaaccggcccaaccccttgctggcgttgccccccgcccgcccccacggcccagaggacaaggaccaggcagtggagagcgcccaagcggaggattactcgcagctgcccggagaagatcacatcctggagcacctgcccgcccggctcaatgaggccctgctggaggcctgcgtggagcccacggacctgctgaccaccctctccaacatgctgcctgtgcgtctggccacggccatgatggtgccctacacgctgccgctggagagcgctctgtccttcaccatccgcttgctggagtggctgcccgacgttcccgaggacatccggtggatgaaggagcagacgggcagcatctgccagtacctggtgatgcgcgccaagaggaagctgggcaggcacctgccctccaggctgccggagcaggtggagctgcgccgcgtccagtcgctgccgtccgtgccgctgtcctgcgccgcctacagagaggcactgcccggctggatgcgcaacaacctctcgctgggggacgcgctggccaagtgggaggagtgccagcgccagctgctgctcggcctcttctgcaccaacgtggccttcccgcccgaagctctgcgcatgcgcgcacccgccgacccggctcccgcccccgcggacccagcatccccgcagcaccagctggccgggcctgcccccttgctgagcacccctgctcccgaggcccggcccgtgatcggggccctggggctgtgagaccccgaccctctcgaggaaccctgcctgagacgcctccattaccactgcgcagtgagatgaggggactcacagttgccaagaggggtctttgccgtgggccccctcgccagccactcaccagctgcatgcactgagaggggaggtttccacacccctcccctgggccgctgaggccccgcgcacctgtgccttaatcttccctcccctgtgctgcccgagcacctcccccgcccctttactcctgagaactttgcagctgcccttccctccccgtttttcatggcctgctgaaatatgtgtgtgaagaattatttattttcgccaaagcacatgtaataaatgctgcagcccagcctctgcccactttgtgtgtatgtgaccgcctgcttacttgcagtgagagcctggtggccagggtctggccctaccttggctgaccagcctctccacagctgcaggccaggtctcccagcgtcgcactcctgggcctggcatttggaacctgccaggctggcctgggaacacccccctacaggcacatatgaacgtactgcattcctgccgacccccctgtctaggatgcatccacaccccccccaattttgcccagcagcctcctggctgacccttggccacagccttctgagggccaatggaaatatttgggaccaagattcttggtaaataaaaacgaaaatgtttgcaaaaaaaaaaaaaaaaaa

SEQ ID NO: 2596 - DNA, 1317 bp, Homo sapiens; identical to SEQ ID NO: 2003

SEQ ID NO: 2597 - DNA, 5458 bp, Homo sapiens; identical to SEQ ID NO: 586

SEQ ID NO: 2598 - DNA, 1520 bp, Homo sapiens
gccgcgcggggccatttccgctgctgcttctgtgagtttttccggtgcacgcgagtgcttctgaaacgtcagctgcgctcccctaggagtgctgagcccgcggaaccgcagccatgactgaggctgatgtgaatccaaaggcctatccccttgccgatgcccacctcaccaagaagctactggacctcgttcagcagtcatgtaactataagcagcttcggaaaggagccaatgaggccaccaaaaccctcaacaggggcatctctgagttcatcgtgatggctgcagacgccgagccactggagatcattctgcacctgccgctgctgtgtgaagacaagaatgtgccctacgtgtttgtgcgctccaagcaggccctggggagagcctgtggggtctccaggcctgtcatcgcctgttctgtcaccatcaaagaaggctcgcagctgaaacagcagatccaatccattcagcagtccattgaaaggctcttagtctaaacctgtggcctctgccacgtgctccctgccagcttcccccctgaggttgtgtatcatattatctgtgttagcatgtagtattttcagctactctctattgttataaaatgtagtactaaatctggtttctggatttttgtgttgtttttgttctgttttacagggttgctatcccccttcctttcctccctccctctgccatccttcatccttttatcctccctttttggaacaagtgttcagagcagacagaagcagggtggtggcaccgttgaaaggcagaaagagccaggagaaagctgatggagccaggacagagatctggttccagctttcagccactagcttcctgttgtgtgcggggtgtggtggaattaaacagcattcattgtgtgtccctgtgcctggcacacagaatcattcatacgtgttcaagtgatcaaggggtttcatttgctcttgggggattaggtatcatttggggaggaagcatgtgttctgtgaggttgttcggctatgtccaagtgtcgtttactaatgtacccctgctgtttgcttttggtaatgtgatgttgatgttctccccctacccacaaccatgcccttgagggtagcagggcagcagcataccaaagagatgtgctgcaggactccggaggcagcctgggtgggtgagccatggggcagttgacctgggtcttgaaagagtcgggagtgacaagctcagagagcatgaactgatgctggcatgaaggattccaggaagatcatggagacctggctggtagctgtaacagagatggtggagtccaaggaaacagcctgtctctggtgaatgggactttctttggtggacacttggcaccagctctgagagcccttcccctgtgtcctgccaccatgtgggtcagatgtactctctgtcacatgaggagagtgctagttcatgtgttctccattcttgtgagcatcctaataaatctgttccattttgatgacaaaaaaaaaaaaaaaaaaaaa

SEQ ID NO: 2599 - DNA, 3214 bp, Homo sapiens
aggggaggggactgggaacggtgggagccgccgtgtgtggagaagctgctgccggtgtcatggcggagctgagtgaggaggcgctgctgtcagtattaccgacgatccgggtccctaaggctggagaccgggtccacaaagacgagtgcgccttctccttcgacacgccggagtctgaggggggcctctacatctgtatgaacacgtttctgggctttgggaaacagtatgtggagagacatttcaataagaccggccagcgagtctacttgcacctccggcggacccggcgcccgaaagaggaggaccctgctacaggcactggagacccaccccggaagaagcccacgcggctggctattggtgttgaaggcggatttgaccttagcgaggagaagtttgaattagacgaggatgtgaagattgtcattttgccagattacctggagattgcccgggatggactggggggactgcctgacattgtcagagatcgggtgaccagtgcagtggaggccctactgtcggccgactcagcctcccgcaagcaggaggtgcaggcatgggatggggaagtacggcaggtgtctaagcatgccttcagcctcaagcagttggacaaccctgctcgaatccctccctgtggctggaagtgctccaagtgtgacatgagagagaacctgtggctcaacctgactgatggctccatcctctgtgggcgacgctacttcgatggcagtgggggcaacaaccacgctgtggagcactaccgagagacaggctacccgttagctgtcaagctgggcaccatcacccctgatggagctgacgtgtactcatatgatgaggatgacatggtcctggaccccagcctggctgagcacctgtcccacttcggcatcgacatgctgaagatgcagaagacagacaagacgatgactgagttggagatagacatgaaccagcggattggtgaatgggagctgatccaggagtcaggtgtgccactcaagcccctgtttgggcctggctacacaggcatccggaacctgggtaacagctgctacctcaactctgtggtccaggtgctcttcagcatccctgacttccagaggaagtatgtggataagctggagaagatcttccagaatgccccgacggaccctacccaggatttcagcacccaggtggccaagctgggccatggccttctctccggggagtattccaagccagtaccggagtcgggcgatggggagcgggtgccagaacagaaggaagttcaagatggcattgcccctcggatgttcaaggccctcatcggcaagggccaccctgaattctccaccaaccggcagcaggatgcccaggagttcttccttcaccttatcaacatggtggagaggaattgccggagctctgaaaatcctaatgaagtgttccgcttcttggtggaggaaaagatcaagtgcctggccacagagaaggtgaagtacacccagcgagttgactacatcatgcagctgcctgtgcccatggatgcagcccttaacaaagaggagcttctggagtacgaggagaagaagcggcaagccgaagaggagaagatggcactgccagaactggttcgggcccaggtgcccttcagctcttgcctggaggcctacggggcccctgagcaggtcgatgacttctggagcacggccctgcaggccaagtcagtagctgtcaagaccacacgatttgcctcattccctgactacctggtcatccagatcaagaagttcaccttcggcttagactgggtgcccaagaaactggatgtgtccatcgagatgccagaggagctcgacatctcccagttgaggggcacagggctgcagcccggagaggaggagctgccagacattgccccacccctggtcactccggatgagcccaaaggtagccttggtttctatggcaacgaagacgaagactccttctgctcccctcacttctcctctccgacatcgcccatgctggatgaatcagtcatcatccagctggtggagatgggattccctatggacgcctgccgcaaagctgtctactacacgggcaacagcggggctgaggccgccatgaactgggtcatgtcacacatggatgatccagattttgcaaaccccctcatcctgcctggctctagtgggccgggctccacaagcgcagcagccgacccccctcctgaggactgtgtgaccaccattgtctccatgggcttctcccgggaccaggccttgaaagcgctgcgggccacgaacaatagtttagaacgggctgtggactggatcttcagtcacattgacgacctggatgctgaagctgccatggacatctcagagggccgctcagctgccgactccatctctgagtctgtgccagtgggacctaaagtccgggatggtcctggaaagtatcagctctttgccttcattagtcacatgggcacctctaccatgtgtggtcactacgtctgccacatcaagaaagaaggcagatgggtgatctacaatgaccagaaagtgtgtgcctccgagaagccgcccaaggacctgggctacatctacttctaccagagagtggccagctaagagcctgcctcaccccttaccaatgagggcaggggaagaccacctggcatgagggagaggggctgagggatggacttcagcccctctgctctgtaccctttttccttttgtccccggcagcagggaagaagctggaggccgtgggagaatggctgggcagagcagaggggcagcgatagactctggggatggagcaggacggggacgggaggggccggccacctgtctgtaaggagactttgttgcttcccctgcccccggaatccacagtgctctgcttctctgtgtcgccccgcccagccccctggtgtggagggaggggtctcgtttgtgcgcgtgggtgtagctttgtgcatcctctcccagtggagcgatcacctgtgcctcccctccccctttgtttgcccctgtgtggttggtcaaggagggatgtgagggaaatagggaccccccgacttgccctcctgcctcagtctttcccccaccctgtctcttccttgtccttctctggaaaatgccaaaatacacgatgtgaataaaagtacaacggctaaaaaaaaaaaaaaaaaaaaaaaaaa

SEQ ID NO: 2600 - DNA, 7237 bp, Homo sapiens
gaggaagaggaagtcggagcccgagcctgagcccgagcccgagcccgacggcggctgcagggcgctccggcagcccgagccggcgcagcgcagcccgcaccctccccgcccgacctgcgagcgccgcccgggcatgcgaagccgtccctccccgggtgaagactgatgagaagagtctgtgggtgaagacattgaaaaggtttcaactataaaaatgggcaccagttgcgtcttgaagtgccatcagctgtaaccaaagttccacatcccaagacgacagccaggcgttcctgccctcaagaactgaagacaatggagctctctgatagtgaccgacccgtcagcttcggttccacatcatcctcggcctcttcccgcgacagccatggttccttcggcagcagaatgaccttagtttcaaatagccacatgggcttgtttaaccaggataaggaggtaggggccataaaactggagctgattcctgccaggccgttttccagcagcgagctgcagagggacaaccccgccacggggcaacagaacgcggatgagggcagcgaaaggccacccagagcgcagtggagagtggactcaaacggggcacccaagacgatcgcagactcggccacgagccccaagctcctctatgtggatagagttgttcaggaaattctggaaaccgaaaggacttatgtacaagatttaaaaagcatcgtagaggattaccttgactgcatcagggaccaaacaaaacttcccctggggaccgaagaaagatcagccctttttggaaacatacaggatatctaccacttcaatagtgaacttctgcaagatttggaaaactgtgaaaatgatcctgtggccatagcagagtgttttgtgtccaagagtgaagagttccacatttatacccagtattgcactaactatccaaggtccgtggctgtgctaacagagtgtatgaggaacaagatactggccaaattcttcagggagcgtcaggaaactctgaaacactcgctgcctctggggtcctatctcttgaaaccagttcagcggattctcaagtatcatctccttctgcatgaaatagaaaaccaccttgataaggacacagaaggctatgatgtggtgcttgatgctatagacacaatgcagcgagtcgcctggcatatcaatgacatgaagcggaaacacgagcacgcggtccggttacaggagatacagagtttgctcactaactggaaggggccagacctgaccagctacggggaactggtgcttgagggaaccttccgcatccagcgagccaagaatgagcggacgctcttcctcttcgacaagctgctgctcatcacgaagaagagagatgacacgtttacatacaaagctcacatcctgtgtggcaacctcatgcttgtggaggtgattccaaaagagccgctcagcttcagcgtcttccactacaagaatcccaagctgcagcacacagtccaggccaaatcccagcaagacaaacgcctctgggttctgcacctaaagagactgattctggagaaccatgcagccaagattccagctaaggccaagcaagcaatccttgaaatggatgccattcatcatccaggcttctgttacagtcctgagggagggacgaaagcactgttcggctctaaagaaggttctgctccatatcggctgagaagaaaatctgaaccttcctcacggtcacataaagttttgaagaccagtgaaacagcacaagacatccaaaaggtttctagagaggaaggatctccccagctgtcttcagcaaggccgtctcctgcccagagaaatagtcagcctagcagttctaccatgatcagcgtgcttcgagcgggtggagctctcagaaacatctggaccgatcaccagatcaggcaagccttgtttcccagccgacggtccccgcaggagaatgaggatgatgaagatgattatcagatgttcgtgccgtcattttcctcctcagatctgaactctaccagactatgtgaagatagcacttctagtcgcccttgcagctggcatatgggacagatggagtccacagagacctccagctctggtcacaggattgtcaggcgggccagcagtgctggggagagcaacacatgccctcctgaaataggaactagtgacagaactagggaactgcagaacagccccaaaacagaagggcaggaggagatgactccctttgggtcatccatagagttgactattgatgacatagaccatgtctatgataacatcagttatgaggacttaaaactaatggttgctaagcgggaagaagctgaatccactccctctaaatcagccagggactccgttcgccccaagagcaccccagagttagccttcacaaagaggcaagctggccacagtaagggctctctttacgcacaaacagatggcaccctctcaggtggagaggcatccagccaaagcacgcatgaactccaagcggttgaggagaacatctatgacaccatagggctcccagatcctccgtcgctgggttttaagtgcagcagcctaaagcgtgcaaagcggagcacctttttgggtctggaggccgacttcgtgtgctgtgacagcctgaggccatttgtttcccaagacagcctccagctcagtgaggacgaagccccttaccatcaggccactcccgatcatggttatctgagtttgctgtatgactctcccagtggtaacttgtctatgcctcataagcctgtatctgataaactgtccgaagaagtagatgaaatctggaatgacctggaaaattacatcaagaaaaatgaagacaaggccagagaccgtctcctggcagcgtttcctgtgagcaaggatgatgtgccagacaggctgcacgcagagagcacccctgagctgagccgggacgtggggcgctctgtgtccacgctgtccctgcctgagagccaggctctcctcacgcccgtgaagagcagggctggcagagccagccgcgccaactgcccctttgaggaagacctgatttctaaagaaggctcctttatgagccttaaccggctttctctggctagtgaaatgcccctcatggacaatccctacgacctggccaacagtggcctgtctcaaacagacccagaaaaccctgacctggggatggaggccacagataagacaaaaagcagggtgtttatgatggctcggcagtacagtcagaagattaagaaggcgaatcaacttttaaaagtgaaaagtctggagctggagcagccgccggccagtcagcatcagaaatccatgcacaaagacctggctgccatcttggaagagaagaagcaaggagggcccgccattggtgccaggattgctgagtattcccagttgtatgaccagattgtattcagagagtctcccttgaaaattcagaaggatggctgggccagccctcaagaatcctccctcctgaggtctgtgtcaccttcccaggtccaccatggtagtggagactggcttctgcattcaacctatagtaatggagagttagcagatttctgtctcccaccagagcaagacttgaggtcaagatatcccacgtttgagatcaatacaaaaagtactcccaggcaattgtccgcagcttgctctgtgccttctcttcaaacctctgaccctctgccaggctctgtgcagagatgcagcgtggtagtaagtcagcccaacaaagagaactggtgtcaggaccatctttacaactccttgggtcggaaagggatcagcgctaaatctcagccttatcacaggtcccagtcatcttcctccgtcttgatcaacaaatcaatggattccatcaactaccctagtgatgtgggaaagcagcagctgctgtctttacacagaagttcaaggtgtgagagtcaccaggacttgctgccagatattgctgactcgcatcaacagggcactgaaaaactctcagatctcacactccaagactcacagaaagttgtggtggtcaatagaaatttacccttaaatgcccaaattgcaacacagaattatttttccaatttcaaagagactgatggagatgaagatgactatgtggaaatcaagtcagaagaagatgagtcggagttggagctatctcacaatcgtagaaggaaatctgactcaaagtttgtggatgctgacttttctgataatgtctgcagcggcaacacattgcattctttgaatagtccgcgcactccaaaaaagccggttaacagcaaacttggcctttcaccatatctgacaccatataatgattctgacaaactgaatgactatctttggagggggccatctcccaatcaacaaaatattgtccagtctctaagggaaaaatttcagtgtctcagttcaagcagctttgcttaaggttcttcataataactgcttgaatcaacttcttattttgctcataaaacgttacagatactgatgaggtgttttatgtataccagattaaaacaattttgtaagaaccagaggtgtaaaatatactttcttttacagcacaacttttggaaatggctgacgatgcagcccggattgtactgtagcacatgttggcatcaacagtatattttctcatgctgagtgtcttcatgtttcatgtaagtcaatcttacttgaaagtttttagacttttaacacgatggccataacctgacaatagtgcccacaccttaagaaatgcaataatcctttcctgttatccagaaggcccaggtagttttatcctgtgactcaaaggcagcaaggagactttttcacattttaaaaggcaacgaaagctgttgaaagaattatgcttatatctcacattttggttatatttgtggtaacaccttaggataacgtaagccagagatctgtaaattggactgcagtctgaggtgcccattttagggtttttgtgctagtattcttttatgtcattttgatgcagaaattgtgtgactgttgaaaattaaaatgtagcgggacccattttctgtacgcagaaccctttacctgtattcctggacaaggcctagagaacgagctgctcatcatgtttctaatataatttctggggtgaaatgaatgatttccttactggcttagagaaaaccaaggtcaataaaatgcagattgacttaactattagaaaagatgggatgacttctgggaaccacttaactcttcaaatgactgttgaaagagaaaaagcaaaactgaaatcccaccagaccattttgtgtgcctgtttctaatcgatacaaagttaagcatgagctaaaatcagacaaagcactttaaatttatcctttccagagcgctttgcacatgcaccctcctgagtttgggattctgccaaatgaccaacttgatcctggccctgaggagtcattggctgcaggaatagggcaagaatctatttcctaaactacacataacatgggagcctttttttcgttgttttcaggtatattaaagaatgaaatctttggttactaggtgctgactaataaataacaccttttatattctgaccatttgtcacatttcattgtgatactgtatactgatctaactccttatgaaaggcaacaaacaaaaataagacattgaataaaaagcaaaatcaaagaagctaaagagaaaaatgaaggcagatatattgcaactttataacatattctattttattgaagactgcaattaatgcagcaagaatgctttctcaagcggtggcctttgtattctcattttaatcaggtgtacattctatggcctctcccccatgctgttagtttctattttaaaagatacaataatatatgtagggaaaggggcctgggctcttcatttaaaggtaagcagtaatattgagtaagtgacataattctttttctctttgttaagtcctatgcctctttttcttaactgtaaaacatagaatatgagcgtttttatcttacaaataggtacctaaggcatgtgattttatttttaaataacaaaaaataacccaagtttcttgcttctccaaagtattcttctcatagcttataaaagaaagtccacattgaatagcatggtctgggaacattccttctttattgtgtttatttgaacatgatatgagtttccaagatgaaatgatcaaaaaagataagtaccacaagaaagtttttttgtttggttggtttttttgtttgtttgtttttttcttgagactgagtctctccctgttgcccaagttggagtgcaatcttggctcactgcagcctccacctccccggttccagcgattctcctgcctcagcctcttgaatagctgggattacaggcgcccgccaccacacctggctaatttttgtgttgttagtagaggcggggtttcatcatgttggccaggctggtctcgaactcctgatctcatgatccgtctgcctcggcctcccagagtgctgggattacaggcatgagccactgcgcccggccaagaaagtatgtttttagaggtgtgtgtaagtgcatttgtattacctatgaacaaaattacctgactcttgtcccaggaaagctgtttcgcattttcgctttttgattggtattatccagttctatgtagttcatattattgttctgtctgactctcagaaattacttcttcacgccagtgtcttgttgcatgactttgatgtcacctataggaatacacctcactgcacgtaagtgggtatcttactgtataaaaggtctacatggctttaggttttaggacaaatgtgtagatttatagaccatttctgttggccaggacacagattttgagagctgtgtgtatatatatataatcatgtttgtatttttttcctgaaagttatcaattgcttttgtttaaaacagtttgttttagaggtggggtggggatgtatataacgaggaaaagttatatgtactttaaagtatgtcaagttcttactagtttcctgtactgaaggttcaattttttttatataagtttacttttcacctgctctattctttgtggggaaaaaatgcatctagaaaaacatagtttaaatactgtatataagataatgaaagttagtaacgtccattatttaataaagtttgtaaagtacaaggt

SEQ ID NO: 2601 - DNA, 1871 bp, Homo sapiens; identical to SEQ ID NO: 1666

SEQ ID NO: 2602 - DNA, 1480 bp, Homo sapiens
agtgtttgcaagtcagtcatcatagtggcagcttccgcctgctacaggatatttatatatggaagcataccatggcaggagtgctggaaaggtggtgtcagctaacagttgcttcagccagataaggacgggacaatgactcattcttcccaggacactggttcttgtggcattcaggaagatggaaagctttatgtggtggattccataaatgacttaaacaaactaaacctctgtccagccggatcgcagcatctgttccctctagaggacaaaatcccagtccttggcacaaactcaggaaatggaagccggagtctgttttttgtggggctgctaattgtgctgattgtcagcctggcactggtttttttcgtgatatttctaatagttcaaactggaaacaagatggatgatgtgtcaagaagactaacagctgaaggaaaagacatagatgatcttaagagaatcaataacatgatcgtaaagcgactcaaccaactcaaccaactggactctgaacaaaactaaaggaatgattttctgaaagcacctgctaacaccttgagctttttactttcctgggagtgtacagggttaggaactgagaaagtgcacttcctcaggcaacagatgatctggtcaggcaacccacccctggggcccactttctgcagcaagatgggagcaattccaaggcaagtgggtatgggaatagcaactaaaaaggggtgaacttgtctcagcccccttttatggtagggcacttcaactttaatggggtgggcggctagcagggaggagaatcaacaaagcaagagaacttgactatgtacgtccaacttcttacagaaggagctttgctaccagaacaagttcactgtgtcaatgaagttcatgacacctcatgcacctttacagatatctgggaaagcctgagaaattcattgagttttatgtattgaagggaaccaggtgattactcttttcaataagagggattctgctcaggtgattagactttgactctatttccccagggacagtgatgggtgggccccagagctagttgctgtctggtgtttgctggtgaaaacatgagcagtagttatgtggggctgagagtcaaaagggaaagcctaattaattcaactaatgtttattaagctcctactctgtgcaaatcactctactcaagaggagctcacataagagtgcaggataaagaaaggagatggacagttatatgtaattatataaactttgtgtattttgtttctcatgaaaaaacccctttggcaccctgctgattgatttggaagaaatctgatagatttgtggcctttcctaaattgcactaggaaattatgtagttagaatatttggaacctgcattagttccagcaatgaaagtaagacacacagcatatgacataagacacagtgtgaaataaatgagtttaaaaagcaaaaaaaaaaa

SEQ ID NO: 2603 - DNA, 4557 bp, Homo sapiens; identical to SEQ ID NO: 607

SEQ ID NO: 2604 - DNA, 3115 bp, Homo sapiens
ggccacgcgtgcttgagaaggttcaatggcgtggcagggactagcggccgagttcctgcaggtgccggcggtgacgcgggcttacaccgcagcctgtgtcctcaccaccgccgcggtgcagctggagctcctcagcccctttcaactctacttcaacccgcaccttgtgttccggaagttccaggtctggaggctcgtcaccaacttcctcttcttcgggcccctgggattcagcttcttcttcaacatgctcttcgtgttccgctactgccgcatgctggaagagggctccttccgcggccgcacggccgacttcgtcttcatgtttctcttcgggggcgtccttatgaccctgctgggactcctgggcagcctgttcttcctgggccaggccctcatggccatgctggtgtacgtgtggagccgccgcagccctcgggtgagggtcaacttcttcggcctgctcactttccaggcaccgttcctgccttgggcgctcatgggcttctcgctgctgctgggcaactccatcctcgtggacctgctggggattgcggtgggccatatctactacttcctggaggacgtcttccccaaccagcctggaggcaagaggctcctgcagacccctggcttcctaaagctgctcctggatgcccctgcagaagaccccaattacctgcccctccctgaggaacagccaggaccccatctgccacccccgcagcagtgacccccacccagggccaggcctaagaggcttctggcagcttccatcctacccatgacccctacttggggcagaaaaaacccatcctaaaggctgggcccatgcaagggcccacctgaataaacagaatgagctgcagtctcttggcccacagcactggcttccccatctcacctggccacatccttctatgcctgccccgtcctcactcagtgtggcctctcagcccaactgcaggtggtaggataggggtgcccacagagggcaaagaaactgcccatggttgcctggcagagctttgagctcacaggttgccaggcagagcttttgagctcacaggtgacaggctcagggttctcatcctggccccaccagggccttgggcaagtcctgcccaccataggcctctgctacctgccagtcagcggggaagttcaccagatttcggctgctggggccaggacaggcgtctcctaggttgtgccaaaccagcctacagatgttcctgccagtggtgccttcaggctgatgccaatctagcctctcctgtctctcatcagccaccctgacaggtgggcgtatgcctcatttttcatctggtgatgccaaagccccatggattcaggtgcagaagagggccaggactaggtcttctgccctttctatgacctcagagcctaagttttcaccttagcagagttctgagactgggtgaggcagggacttctggaaggttctgttcctgccctttttagctgaggacgtgtgtgagccttatccgacccctgtggctcatttttctcttctgacctggcagctttccttgttgttctaagcctgtccatgttgtggtttatttctggatgctcagtggcacggggcctcctccaaagacaggttgtcattttcatggtaacaacactgttctctgttgagtctgccctccgtgttgtagccagaccttgtggagatggctttgcggcggtgtgagctggcggtcaggagtgagggcccagccttcccggcacctcccagccaggtggccctgcccgacctgtggggtgaggcagccaaggttccttccatccccccagttgtggagacacagggctgcctcaccctttcattgccgaggttcctacctcatggacagaacaaacacctcagcaatgaaacctgttcatgtctaagagcagctgggctgggaatcttcccctttgttcaaggccttccagtaaggcccagctgtccccttgctgtgcatggggctctggggagttccactctttgatggagggcagaggccctgagtgcaaactccctgggaagagtcccatgctaacatgtgctcaaaggagccctcctctcacatctcagcgaccaagaaccccaatccctaatcagagctctgcctctgccccacatggggccctaccccacttccagggagcacagcagcctctgaccctagccctgccctggcagcatgggacctgccaacagctgagggtggcagcagtctgtgctgggatctgtgcccggatctgtgcccattctcttcagtaaggctggagctgcgagccagtttgctgccctcccagatcctgtgtccattctgaagaatggggacacctccctattacagatgagaacagaggggacatgaactccttggaggcagggctgggaagggaccctgggctgtgtctcctccctgtaccgtgtcaactccaagagctggcaccaggccgggagggctattcccatattcctcacagctggcttgtaaggcaggagctggcccaggccacagcacctgctggggtgggaaagggccccagctgacctggctatgggtgccactggagctagaacagccctcctgcacccaggctggcgacagcccagcagtgcccacacaggactgggccctccgcaggggacttcagagcagcaaggccccagctggcagtagcctgaccatctggacacagcagagccagggcggcccagggacggcaggagagctcgcggcaccttcctgaggccaagcaaggggagcagggttagggctgttcctgaaaggcagagagcctcttgccctgagcctcacagctactcttctcagctctctgggtctggaaggagaacaggctgaggggagctgagaggagctgaggtgctacccggagccccattcacccccacctgcccacttgggaatctgaggcagaggagggtgaggcctgtgtgccaaccttgttcacataccaccttcgtccccccaggccccggccccactcctggctctcattatttttatgttaaaactttgaagaaattgaacatgacctgttgaagaaattgaaaaaaaaaaaaaaaaaa

SEQ ID NO: 2605 - DNA, 18815 bp, Homo sapiens; identical to SEQ ID NO: 979

SEQ ID NO: 2606 - DNA, 561 bp, Homo sapiens; identical to SEQ ID NO: 181

SEQ ID NO: 2607 - DNA, 3180 bp, Homo sapiens
acgccaccccgccctctccctctctgagagcgagatacccggccagacaccctcacctgcggtgcccagctgcccaggctgaggcaagagaaggccagaaaccatgcccatggggtctctgcaaccgctggccaccttgtacctgctggggatgctggtcgcttcctgcctcggacggctcagctggtatgacccagatttccaggcaaggctcacccgttccaactcgaagtgccagggccagctggaggtctacctcaaggacggatggcacatggtttgcagccagagctggggccggagctccaagcagtgggaggaccccagtcaagcgtcaaaagtctgccagcggctgaactgtggggtgcccttaagccttggccccttccttgtcacctacacacctcagagctcaatcatctgctacggacaactgggctccttctccaactgcagccacagcagaaatgacatgtgtcactctctgggcctgacctgcttagaaccccagaagacaacacctccaacgacaaggcccccgcccaccacaactccagagcccacagctcctcccaggctgcagctggtggcacagtctggcggccagcactgtgccggcgtggtggagttctacagcggcagcctggggggtaccatcagctatgaggcccaggacaagacccaggacctggagaacttcctctgcaacaacctccagtgtggctccttcttgaagcatctgccagagactgaggcaggcagagcccaagacccaggggagccacgggaacaccagcccttgccaatccaatggaagatccagaactcaagctgtacctccctggagcattgcttcaggaaaatcaagccccagaaaagtggccgagttcttgccctcctttgctcaggtttccagcccaaggtgcagagccgtctggtggggggcagcagcatctgtgaaggcaccgtggaggtgcgccagggggctcagtgggcagccctgtgtgacagctcttcagccaggagctcgctgcggtgggaggaggtgtgccgggagcagcagtgtggcagcgtcaactcctatcgagtgctggacgctggtgacccaacatcccgggggctcttctgtccccatcagaagctgtcccagtgccacgaactttgggagagaaattcctactgcaagaaggtgtttgtcacatgccaggatccaaaccccgcaggcctggccgcaggcacggtggcaagcatcatcctggccctggtgctcctggtggtgctgctggtcgtgtgcggcccccttgcctacaagaagctagtgaagaaattccgccagaagaagcagcgccagtggattggcccaacgggaatgaaccaaaacatgtctttccatcgcaaccacacggcaaccgtccgatcccatgctgagaaccccacagcctcccacgtggataacgaatacagccaacctcccaggaactcccacctgtcagcttatccagctctggaaggggctctgcatcgctcctccatgcagcctgacaactcctccgacagtgactatgatctgcatggggctcagaggctgtaaagaactgggatccatgagcaaaaagccgagagccagacctgtttgtcctgagaaaactgtccgctcttcacttgaaatcatgtccctatttctaccccggccagaacatggacagaggccagaagccttccggacaggcgctgctgccccgagtggcaggccagctcacactctgctgcacaacagctcggccgcccctccacttgtggaagctgtggtgggcagagccccaaaacaagcagccttccaactagagactcgggggtgtctgaagggggccccctttccctgcccgctggggagcggcgtctcagtgaaatcggctttctcctcagactctgtccctggtaaggagtgacaaggaagctcacagctgggcgagtgcattttgaatagttttttgtaagtagtgcttttcctccttcctgacaaatcgagcgctttggcctcttctgtgcagcatccacccctgcggatccctctggggaggacaggaaggggactcccggagacctctgcagccgtggtggtcagaggctgctcacctgagcacaaagacagctctgcacattcaccgcagctgccagccaggggtctgggtgggcaccaccctgacccacagcgtcaccccactccctctgtcttatgactcccctccccaaccccctcatctaaagacaccttcctttccactggctgtcaagcccacagggcaccagtgccacccagggcccggcacaaaggggcgcctagtaaaccttaaccaacttggttttttgcttcacccagcaattaaaagtcccaagctgaggtagtttcagtccatcacagttcatcttctaacccaagagtcagagatggggctggtcatgttcctttggtttgaataactcccttgacgaaaacagactcctctagtacttggagatcttggacgtacacctaatcccatggggcctcggcttccttaactgcaagtgagaagaggaggtctacccaggagcctcgggtctgatcaagggagaggccaggcgcagctcactgcggcggctccctaagaaggtgaagcaacatgggaacacatcctaagacaggtcctttctccacgccatttgatgctgtatctcctgggagcacaggcatcaatggtccaagccgcataataagtctggaagagcaaaagggagttactaggatatggggtgggctgctcccagaatctgctcagctttctgcccccaccaacaccctccaaccaggccttgccttctgagagcccccgtggccaagcccaggtcacagatcttcccccgaccatgctgggaatccagaaacagggaccccatttgtcttcccatatctggtggaggtgagggggctcctcaaaagggaactgagaggctgctcttagggagggcaaaggttcgggggcagccagtgtctcccatcagtgccttttttaataaaagctctttcatctatagtttggccaccatacagtggcctcaaagcaaccatggcctacttaaaaaccaaaccaaaaataaagagtttagttgaggagaaaaaaaaaaaaaaaaaaaaaaaaa

SEQ ID NO: 2608 - DNA, 2934 bp, Homo sapiens
atagtcggaagtgcgcaggcagtgctcgcggcggcggcgacggcggcgggaggttcggttgtcgcccgttggccgcgcggcgccgcgctcggcggccgccattgcagcttgttttcacttgctttttaaagacagaaagctcatggtgcaaattgttatttccagtgcgagggctggaggcctggcagaatgggtgctgatggagctacagggggagatcgaggctcgctacagcactggattagctggaaacctcctgggagacctacattacaccactgagggaatccctgtgctgatcgtggggcatcatatcctgtatgggaaaatcatccacctggagaaaccttttgcagtccttgtcaaacacactcctggggatcaggactgtgatgagcttggccgcgagactggcacccggtacctggtgacagcactcatcaaagacaagatccttttcaaaacccgccccaagcccattatcaccagcgtccccaagaaagtatgaaagaacctcggattttccctagagagcggccaactccttggactcgtgctccgctgccacctcgaggacggctcgacggttccctgggaccacaggggggtcctgttctgaacacaggccacccactgggtgtgaactcggatcccttccttatggcggccggttctcttggtggaaatctgaccccatttccaaggaacccatctccttttccagcttcatcaggctcattggcttcaaatccagcacctttcccggctggtgctcgtgacccaagtatggcttcttttccaagagggatgaatcccactggcacaggtgcagtttctttcccaaggcctggtggcctcttggggccaggcccaggcccaggccccaccctaaaccctaggacaggggctctgccaggcccagggcctctgtctaaccccaggttagggggtctcccaggaccaggtcctatgtccaacccaagggcaggtggtctcctgggagcaggtcctgaccccagaggtggtggtcccatgggccctggatctggacctaacctgagagccggtgttctgttaacctctgggaatggtcctcccaatcctaggccagttggcctgggcccaggaccaaaccccaatctgagatcaggctttttagggacaaaccctgcccccaggtcaggtgtgtttccaggcccaggccttgggcccaacccaagaccaagtggcctgggcccaggccctaatctagatgccagagcaggtggcctcttgggcacaggatctggtcttaacttaagaatggctggacctcaaggcctcgatcttgcccccattctaagagcagcaggtcttttaggagcaaattcagcttctttctcacaggcttctggaaacatgggcacaagcccatcctccatggcaagagtacctggccccatgggcccaaactcgggtcctagctctcggggaattggccttccagggccaaatccatctcccatgtcaagggctcctggccccataggccctaattcagctcatttctcaaggccagttggccccatgggggtaaatgccaatccctttcccaggggagcaggttcatctgccttttctcagtcttctggcacattggcatcaaacccagctaccttccaaaggtccgctggcctccagggctcaaatccaaccattttcccaagagcctctgggccacttggccccaacccagctaacttcccaagggccactggcctgcagggtccaagtccaactaccttcccaaggtctactggcccattaggccctggtcaagttactttccccaggccagctgccgggcatctgggcccttctccagctggccctgtgggtatcaacccagctcctttcacaaggccaactgggaccctgggtctcaacccagcttcctttccaaggatgaatggccctgcaggcaagagtttcgtcccatttcctagagtggggagcctccctggcacaaacccagctgctttccccagaccagggggtccaatggctgcaatgtacccaaatggaatgttgcccccttaaacaccattttccctccaggaccaccttggtttctaggcactgtggttcttggcaggggctgtcttaggtaaaagggtagttgtggagctacagtctgaagaacatagcttgggctcaagttcaaatgagccatctttttcctttgcgtttttcttgactgaaggtgagatgttatttgtggcatgtgaactgtggcaggtgggaataatcctgcccttgagagaaaggatctccagcctcccagaagcctgctgtgctttcgtcccacagctttctgcccattgtttcttactagtttcttgaattgttcttgtggacttttcctcagggatacattggcctgcaggtcccagttcacatgtagtcccctgctcaccattggagaatcagctcactgctctctagaaacgtggcgttggtgaacggaccatgcttccgtagctctgacctgggcagcttggacctggtcatcctctactgccatacctttccctgggggcttgaacacagaacagggagatggacaaccacttcaaagaaagacccaccgaatgcagtttctgcttgactgactgggcctgcagctcccttctcctgggacttagaggtggccagatttaaggcccctctactcatccaactccctcttcactggtactcccaatcaatcaaagaacctcaaaatttaaactgatgtggatgggaatatgggaattagggtgggggtgggggatgaagggaagaaatcactgtgctttgttcggcctggtgtgcaaggatggttggtggttttcctgcattgtatcttttcttactgtttctttaataaatgggatgagagggctaaaaaaaaaa

SEQ ID NO: 2609 - DNA, 7311 bp, Homo sapiens
gaactcgggttgcgcacttcccggcgctgggaacgcggagcggacgcagtctggccgccattgcgctgcggggaaagcggcctcttgtgtgagggcctgtgggattctccggatatggccggagtgtttccttatcgagggccgggtaacccggtgcctggccctctagccccgctaccggactacatgtcggaggagaagctgcaggagaaagctcgaaaatggcagcaattgcaggccaagcgctatgcagaaaagcggaagtttgggtttgtggatgcccagaaggaagacatgcccccagaacatgtcaggaagatcattcgagaccatggagacatgaccaacaggaagttccgccatgacaaaagggtttacttgggtgccctaaagtacatgccccacgcagtcctcaaactcctggagaacatgcctatgccttgggagcagattcgggatgtgcctgtgctgtaccacatcactggagccatttccttcgtcaatgagattccctgggtcattgaacctgtctacatctcccagtgggggtcaatgtggattatgatgcgccgagaaaaaagagataggaggcatttcaagaggatgcgttttcccccttttgatgatgaggagccgcccttggactatgctgacaacatcctagatgttgagccactggaggccattcagctagagctggaccctgaggaggacgcccctgtgttggactggttctatgaccaccagccgttgagggacagcaggaagtatgtaaatggctccacttaccagcgctggcagttcacactacctatgatgtcgactctctaccgcctggctaatcagctcctgacagacttggtggatgacaactacttctacctgtttgatttgaaggccttctttacgtccaaggcactcaatatggccattcctggaggccccaaatttgaacctcttgttcgagacatcaacctacaggatgaagactggaatgaattcaatgatattaacaagattatcatccggcagcctatccgcactgagtacaagattgcttttccttacttgtacaacaatcttccacaccatgtccacctcacctggtaccatactcccaatgttgtattcatcaaaactgaggatcctgacttgccagctttctactttgaccctttgatcaacccaatctcccataggcactcagtcaagagccaggaaccattgccggatgatgatgaggaatttgagctcccggagtttgtggagcccttcctgaaggacacacccctctatacagacaatacagccaatggcattgccctgctctgggccccgcggcccttcaacctacgctctggtcgcacccgtcgggccctggacataccccttgtcaagaactggtatcgggagcattgtcctgccgggcagcctgtgaaagtgagggtctcctaccagaagctgcttaagtactatgtgctgaatgccctgaagcatcggccccctaaggctcaaaagaagaggtatttgttccgctccttcaaagccaccaaattctttcagtccacaaagctggactgggtggaggttgggctccaggtttgccgccagggctacaacatgctcaaccttctcattcaccgcaaaaacctcaactacctgcacctggactacaacttcaacctcaagcctgtgaaaacgctcaccaccaaggaaagaaagaaatctcgttttgggaatgctttccacctgtgtcgggaagttctgcgtttgactaagctggtggtggatagtcacgtgcagtatcggctgggcaatgtggatgccttccagctggcagatggattgcagtatatatttgcccatgttgggcagttgacgggcatgtatcgatacaaatacaagctgatgcgacagattcgcatgtgcaaggacctgaagcatctcatctattatcgtttcaacacgggccctgtagggaagggtcctggctgtggcttctgggctgccggttggcgagtctggctctttttcatgcgtggcattacccctttattagagcgatggcttggcaacctcctggcccggcagtttgaaggtcgacactcaaagggggtggcaaagacagtaacaaagcagcgagtggagtcacattttgaccttgagctgcgggcagctgtgatgcatgatattctggacatgatgcctgaggggatcaagcagaacaaggcccggacaatcctgcagcacctcagtgaagcctggcgctgctggaaagccaacattccctggaaggtccctgggctgccgacgcccatagagaatatgatccttcgatacgtgaaggccaaggctgactggtggaccaacactgcccactacaaccgagaacggatccgccgaggggccactgtggacaagactgtttgtaaaaagaatctgggccgcctcacccggctctatctgaaggcagaacaggagcggcagcacaactacctgaaggacgggccttacatcacagcggaggaagcagtggcagtatataccaccacagtgcattggttggaaagccgcaggttttcacccatcccattccccccactctcctataagcatgacaccaagttgctcatcttggcattggagcggctcaaggaagcttatagtgtgaagtctcggttgaaccagtctcagagggaggagctaggtctgatcgagcaggcctacgataacccccacgaggcgctgtcccgcatcaagcgtcacctcctcacacagagagccttcaaagaggtgggcattgagttcatggatctgtatagccacctcgttccagtatatgatgttgagcccctggagaagataactgatgcttacctggaccagtacctgtggtatgaagccgacaagcgccgcctgttcccaccctggattaagcctgcagacacagaaccacctccgctgcttgtttacaagtggtgtcaaggcatcaataacctgcaggacgtgtgggagacgagtgaaggcgagtgcaatgtcatgctggaatcccgctttgagaagatgtatgagaagatcgacttgactctgctcaacaggctgctgcgcctcatcgtggaccacaacatagccgactacatgacagccaagaacaacgtcgtcatcaactataaggacatgaaccatacgaattcatatgggatcatcagaggcctgcagtttgcctcattcatcgtgcagtattatggcctggtgatggatttgcttgtattgggattgcaccgggccagtgagatggctgggccccctcagatgccaaatgactttctcagtttccaggacatagccactgaggctgcccaccccatccgtctcttctgcagatacattgatcgcatccatatttttttcaggttcacagcagatgaggctcgggacctgattcaacgttacctgacagagcaccctgaccccaataatgaaaacatcgttggctataataacaagaagtgctggccccgagatgcccgcatgcgcctcatgaaacatgatgttaacttaggccgggcggtattctgggacatcaagaaccgcttgccacggtcagtgactacagttcagtgggagaacagcttcgtgtctgtgtacagtaaggacaaccccaacctgctgttcaacatgtgtggcttcgagtgccgcatcctgcctaagtgccgcaccagctatgaggagttcacccacaaggacggggtctggaacctgcagaatgaggttactaaggagcgcacagctcagtgtttcctgcgtgtggacgatgagtcaatgcagcgcttccacaaccgcgtgcgtcagattctcatggcctctgggtccaccaccttcaccaagattgtgaataagtggaatacagctctcattggccttatgacatactttcgggaggctgtggtgaacacccaagagctcttggacttactggtgaagtgtgagaacaaaatccagacacgtatcaagattggactcaactccaagatgccaagtcggttccccccggttgtgttctacacccctaaggagttgggtggactcggcatgctctcaatgggccatgtgctcatcccccaatccgacctcaggtggtccaaacagacagatgtaggtatcacacactttcgttcaggaatgagccatgaagaagaccagctcattcccaacttgtaccgctacatacagccatgggagagcgagttcattgattctcagcgggtctgggctgagtacgcactcaagaggcaagaggccattgctcagaacagacgcctgactttagaagacctagaagattcatgggatcgtggcattcctcgaatcaataccctcttccagaaggaccggcacacactggcttatgataagggctggcgtgtcagaactgactttaagcagtatcaggttttgaagcagaatccgttctggtggacacaccagcggcatgatgggaagctctggaacctgaacaactaccgtacagacatgatccaggccctgggcggtgtggaaggcattctggaacacacactctttaagggcacttacttccctacctgggaggggcttttctgggagaaggccagtggctttgaggaatctatgaagtggaagaagctaactaatgctcagcgatcaggactgaaccagattcccaatcgtagattcaccctctggtggtccccgaccattaatcgagccaatgtatatgtaggctttcaggtgcagctagacctgacgggtatcttcatgcacggcaagatccccacgctgaagatctctctcatccagatcttccgagctcacttgtggcagaagatccatgagagcattgttatggacttatgtcaggtgtttgaccaggaacttgatgcactggaaattgagacagtacaaaaggagacaatccatccccgaaagtcatataagatgaactcttcctgtgcagatatcctgctctttgcctcctataagtggaatgtctcccggccctcattgctggctgactccaaggatgtgatggacagcaccaccacccagaaatactggattgacatccagttgcgctggggggactatgattcccacgacattgagcgctacgcccgggccaagttcctggactacaccaccgacaacatgagtatctacccttcgcccacaggtgtactcatcgccattgacctggcctataacttgcacagtgcctatggaaactggttcccaggcagcaagcctctcatacaacaggccatggccaagatcatgaaggcaaaccctgccctgtatgtgttacgtgaacggatccgcaaggggctacagctctattcatctgaacccactgagccttatttgtcttctcagaactatggtgagctcttctccaaccagattatctggtttgtggatgacaccaacgtctacagagtgactattcacaagacctttgaagggaacttgacaaccaagcccatcaacggagccatcttcatcttcaacccacgcacagggcagctgttcctcaagataatccacacgtccgtgtgggcgggacagaagcgtttggggcagttggctaagtggaagacagctgaggaggtggccgccctgatccgatctctgcctgtggaggagcagcccaagcagatcattgtcaccaggaagggcatgctggacccactggaggtgcacttactggacttccccaatattgtcatcaaaggatcggagctccaactccctttccaggcgtgtctcaaggtggaaaaattcggggatctcatccttaaagccactgagccccagatggttctcttcaacctctatgacgactggctcaagactatttcatcttacacggccttctcccgtctcatcctgattctgcgtgccctacatgtgaacaacgatcgggcaaaagtgatcctgaagccagacaagactactattacagaaccacaccacatctggcccactctgactgacgaagaatggatcaaggtcgaggtgcagctcaaggatctgatcttggctgactacggcaagaaaaacaatgtgaacgtggcatcactgacacaatcagaaattcgagacatcatcctgggtatggagatctcggcaccgtcacagcagcggcagcagatcgctgagatcgagaagcagaccaaggaacaatcgcagctgacggcaacacagactcgcactgtcaacaagcatggcgatgagatcatcacctccaccaccagcaactatgagacccagactttctcatccaagactgagtggagggtcagggccatctctgctgccaacctgcacctaaggaccaatcacatctatgtttcatctgacgacatcaaggagactggctacacctacatccttcccaagaatgtgcttaagaagttcatctgcatatctgaccttcgggcccaaattgcaggatacctatatggggtgagcccaccagataacccccaggtgaaggagatccgctgcattgtgatggtgccgcagtggggcactcaccagaccgtgcacctgcctggccagctgccccagcatgagtacctcaaggagatggaacccttaggttggatccacactcagcccaatgagtccccgcagttatcaccccaggatgtcaccacccatgccaagatcatggctgacaacccatcttgggatggcgagaagaccattatcatcacatgcagcttcacgccaggctcctgtacactgacggcctacaagctgacccccagtggctacgaatggggccgccagaacacagacaagggcaacaaccccaagggctacctgccttcacactatgagagggtgcagatgctgctgtcggaccgtttccttggcttcttcatggtccctgcccagtcctcgtggaactacaacttcatgggtgttcggcatgaccccaacatgaaatatgagctacagctggcgaaccccaaagagttctaccacgaggtgcacaggccctctcacttcctcaactttgctctcctgcaggagggggaggtttactctgcggatcgggaggacctgtatgcctgaccgtttccctgcctcctgcttcagcctcccgaggccgaagcctcagcccctccagacaggccgctgacattcagcagtttggcctctttccctctgtctgtgcttgtgttgttgacctcctgatggcttgtcatcctgaataaaatataataataaattttgtataaataggaaaaaaaaaaaaaaaaa

SEQ ID NO: 2610 - DNA, 7907 bp, Homo sapiens
tataaaagaggcggggcgcgcgcgtcgccgccactacccgctgcggagtgaacggtgtggagcggaggccgcggaggctcctcggtccttcagcacccctcggcccgacgcacccacgcccctcaccccccgagagccgaaaatggacccaagtggggtcaaagtgctggaaacagcagaggacatccaggagaggcggcagcaggtcctagaccgataccaccgcttcaaggaactctcaacccttaggcgtcagaagctggaagattcctatcgattccagttctttcaaagagatgctgaagagctggagaaatggatacaggaaaaacttcagattgcatctgatgagaattataaagacccaaccaacttgcagggaaagcttcagaagcatcaagcatttgaagctgaagtgcaggccaactcaggagccattgttaagctggatgaaactggaaacctgatgatctcagaagggcattttgcatctgaaaccatacggacccgtttgatggagctgcaccgccagtgggaattacttttggagaagatgcgagaaaaaggaatcaaactgctgcaggcccagaagttggtgcagtacttacgagaatgtgaggacgtgatggactggatcaatgacaaggaagcaattgttacttctgaagagctgggccaggatctggagcatgtagaggttttacagaagaaatttgaagagtttcaaacagatatggctgctcatgaagaaagagttaatgaagtgaaccagtttgctgccaaactcatacaggagcagcaccctgaggaggaactgatcaagactaagcaggatgaagtcaatgcagcctggcagcggctgaagggcctggctctgcagaggcaggggaagctctttggggcagcagaagttcagcgctttaacagggatgtggatgagactatcagttggattaaggaaaaggagcagttaatggcctctgatgattttggccgagacctggcaagtgttcaggctctgcttcggaagcacgagggtctggagagagatcttgctgctctagaagacaaggtcaaagccctgtgtgctgaggctgaccgcctgcaacagtcccaccctctgagtgcaacacagattcaagtgaagcgagaggaactgattacaaactgggagcagatccgcaccttggcggcagagagacatgcacggctcaatgattcatacaggcttcaacgcttccttgctgacttccgtgacctcaccagctgggtgactgagatgaaagccctcatcaatgcagatgagcttgccagtgatgtggctggggctgaagccctgctagatagacaccaagagcacaagggtgaaattgatgcccatgaagacagcttcaaatctgcagatgaatctggacaggcactgcttgctgctggtcactatgcctcagatgaagtgagggagaagctgaccgtcctttccgaggagagagcggcgctgctggagctgtgggagctgcgcaggcagcagtacgagcagtgcatggacctgcagctcttctaccgggacactgagcaggtggacaactggatgagcaagcaggaggcgttcctgttgaatgaagacttgggagattccttggatagtgtggaagcgcttcttaagaagcacgaagactttgagaaatcccttagtgcccaggaggaaaagattacagcattagatgaatttgcaaccaagctaattcagaacaaccactatgcaatggaagatgtggccactcgccgagatgctctgttgagccgccgcaatgcccttcacgagagagccatgcgtcgccgggcccagctagccgattctttccatctgcagcagtttttccgtgattctgatgagctcaagagttgggtcaatgagaagatgaaaactgccacagatgaagcttataaagatccatccaacctacaaggaaaagtacagaagcatcaggcttttgaggctgagctctcagcaaaccagagccgaattgatgccttggagaaagctggccaaaagctgattgatgtcaaccactatgccaaggatgaagtggcagctcgtatgaatgaggtgatcagtttgtggaagaaactgctagaggccactgaactgaaaggaataaagcttcgtgaagccaaccagcaacagcaatttaatcgcaatgttgaggatattgaattgtggctatatgaagtagaaggtcacttggcttcggatgattacggcaaagatcttaccaatgtgcagaacctccagaagaaacatgccctgctagaggcagatgtggctgctcaccaggaccgaattgatggcatcaccattcaggcccgccagttccaagatgctggccattttgatgcagaaaacatcaagaagaaacaggaagccctcgtggctcgctatgaggcactcaaggagcccatggttgcccggaagcagaagctggccgattctctgcggttgcagcagctcttccgggatgttgaggatgaggagacgtggattcgagagaaagagcccattgccgcatctaccaacagaggtaaggatttaattggggtccagaatctgctaaagaaacatcaagccttacaagcagaaattgctggacatgaaccacgcatcaaagcagttacacagaaggggaatgccatggtggaggaaggccattttgctgcagaggatgtgaaggccaagcttcacgagctgaaccaaaagtgggaggcactgaaagccaaagcttcccagcgtcggcaggacctggaggactctctgcaggcccagcagtactttgctgatgctaacgaggctgaatcctggatgcgggagaaggaacccattgtgggcagcactgactatggcaaggacgaagactctgctgaggctctactgaagaaacacgaagctttgatgtcagatctcagtgcctacggcagcagcatccaggctttgcgagaacaagcacagtcctgccggcaacaagtggcccccacggatgatgagactgggaaggagctggtcttggctctctacgactatcaggagaagagtccccgagaggtcaccatgaagaagggagatatccttaccttactcaacagcaccaacaaggattggtggaaagtggaagtgaacgatcgtcagggttttgtgccggctgcgtacgtgaagaaattggaccccgcccagtcagcctcccgggagaatctcctggaggagcaaggcagcatagcactgcggcaggagcagattgacaatcagacacgcataactaaggaggccggcagtgtatctctgcgtatgaagcaggtggaagaactatatcattctctgctggaactgggtgagaagcgtaaaggcatgttggagaagagttgcaagaagtttatgttgttccgtgaagcgaatgaactacagcaatggatcaatgagaaggaagccgctctgacaagtgaggaggtcggagcagacttggagcaggttgaggtgctccagaagaagtttgatgacttccagaaggacctgaaggccaatgagtcacggttgaaggacattaacaaggtagctgaagacctggagtctgaaggtctcatggcagaggaggtgcaggctgtgcaacaacaggaagtgtatggcatgatgcccagggatgaaactgattccaagacagcctccccgtggaagtctgctcgtctgatggttcacaccgtggccacctttaattccatcaaggagctgaatgagcgctggcggtccctacagcagctggccgaggaacggagccagctcttgggcagcgcccatgaagtacagaggttccacagagatgctgatgaaaccaaagaatggattgaagagaagaatcaagctctaaacacagacaattatggacatgatctcgccagtgtccaggccctgcaacgcaagcatgagggcttcgagagggaccttgcggctctcggtgacaaggtaaactcccttggtgaaacagcagagcgcctgatccagtcccatcccgagtcagcagaagacctgcaggaaaagtgcacagagttaaaccaggcctggagcagcctggggaaacgtgcagatcagcgcaaggcaaagttgggtgactcccacgacctgcagcgcttccttagcgatttccgggacctcatgtcttggatcaatggaatacgggggttggtgtcctcagatgagctagccaaggatgtcaccggagctgaggcattgctggagcgacaccaggaacaccggacagaaatcgatgccagggctggcactttccaggcatttgagcagtttggacagcagctgttggctcacggacactatgccagccctgagatcaagcagaaacttgatattcttgaccaggagcgtgcagacctggagaaggcctgggttcagcgcaggatgatgctggatcagtgccttgaactgcagctgttccatcgggactgtgagcaagctgagaactggatggctgcccgggaggccttcttgaataccgaagacaaaggagactcactggacagcgtagaggctctgatcaaaaaacatgaagactttgacaaagcgattaacgtccaggaagagaagattgctgctctgcaggcctttgccgaccagctcatcgctgccggccattatgccaagggagacatttctagccggcgcaatgaggtcttggacaggtggcgacgtctgaaagcccagatgattgagaaaaggtcaaagctaggagaatctcaaaccctccaacagttcagccgggatgtggatgagattgaggcttggatcagtgaaaaattgcaaacagcgagtgatgagtcgtacaaggatcccaccaacatccagctttccaagctgctgagcaagcaccagaagcaccaggcttttgaagcagagctgcatgccaacgctgaccggatccgtggggttatcgacatgggcaactccctcattgaacgtggagcctgtgccggcagtgaggatgctgtcaaggcccgcctggctgccttagctgaccagtggcagttcttggtgcaaaagtcagcggaaaagagccagaaactgaaagaagccaacaagcagcagaacttcaacacagggatcaaggactttgacttctggctgtctgaggtggaggccctgctggcatccgaagattatggcaaagacctggcttctgtgaacaacctgctgaaaaagcatcaactgctggaagcagatatatctgcccatgaggatcgcctgaaggacctgaacagccaggcagacagcctgatgaccagcagtgccttcgacacctcccaagtaaaggacaagagggacaccatcaacgggcgcttccagaagatcaagagcatggcggcctcccggcgagccaagctgaatgaatcccatcgcctgcaccagttcttccgggacatggatgacgaggagtcctggatcaaggagaagaagctgctggtgggctcagaggactacggccgggacctaaccggcgtgcagaacctgaggaagaagcacaagcggctggaagcagaactggctgcgcatgagccggctattcagggtgtcctggacactggcaagaagctgtccgatgacaacaccatcgggaaagaggagatccagcagcggctggcgcagtttgtggagcactggaaagagctgaagcagctggcagctgcccggggtcagcggctggaagagtccttggaatatcagcagtttgtagccaatgtggaagaggaagaagcctggatcaatgagaaaatgaccctggtggccagcgaagattatggcgacactcttgccgccatccagggcttactgaagaaacatgaagcttttgagacagacttcaccgtccacaaggatcgcgtgaatgatgtctgcaccaatggacaagacctcattaagaagaacaatcaccatgaggagaacatctcttcaaagatgaagggcctgaacgggaaagtgtcagacctggagaaagctgcagcccagagaaaggcgaagctggatgagaactcggccttccttcagttcaactggaaggcggacgtggtggagtcctggatcggtgaaaaggagaacagcttgaagacagatgattatggccgagacctgtcttctgtgcagacgctcctcaccaaacaggaaacttttgacgctgggctgcaggccttccagcaggaaggcattgccaacatcactgccctcaaagatcagcttctcgccgccaaacacgttcagtccaaggccatcgaggcccggcacgcctccctcatgaagaggtggagccagcttctggccaactcagccgcccgcaagaagaagcttctggaggctcagagtcacttccgcaaggtggaggacctcttcctgaccttcgccaaaaaggcttctgccttcaacagctggtttgaaaatgcagaggaggacttaacagaccccgtgcgctgcaactccttggaagaaatcaaagctttgcgcgaggcccacgacgccttccgctcctccctcagctctgcccaggctgacttcaaccagctggccgagctggaccgccagatcaagagcttccgcgtagcctccaacccctacacctggtttaccatggaggccctggaggagacctggaggaacctacagaaaatcatcaaggagagggagctggagctgcagaaggaacagcggcggcaggaggagaacgacaagctgcgccaggagtttgcccagcacgccaacgccttccaccagtggatccaagagaccaggacatacctcctcgatgggtcctgtatggtggaagagtcggggaccctcgaatcccagcttgaagctaccaaacgcaagcaccaggaaatccgagccatgagaagtcagctcaaaaagatcgaggacctgggggccgccatggaggaggccctcatcctggacaacaagtacacggagcacagcaccgtgggcctcgcccagcagtgggaccagctggaccagctgggcatgcgcatgcagcacaacctggagcagcagatccaggccaggaacacaacaggtgtgactgaggaggccctcaaagaattcagcatgatgtttaaacactttgacaaggacaagtctggcaggctgaaccatcaggagttcaaatcttgcctgcgctccctgggctatgacctgcccatggtggaggaaggggaacctgaccctgagttcgaggcaatcctggacacggtggatccgaacagagatggccatgtctccttgcaagaatacatggctttcatgatcagccgcgaaactgagaacgtcaagtccagcgaggagattgagagcgccttccgggccctcagctcagagggaaagccttacgtgaccaaggaggagctctaccagaacctgacccgggaacaagccgactactgcgtctcccacatgaagccctacgtggacggcaagggccgcgagctccccaccgcgttcgactacgtggagttcacccgctcgcttttcgtgaactgagccactccctgggtcacccacccctcgctgcttgccctgcgtcgccttgctgcatgtccgctcctctgtgtgctctcactttccactgtaaccttaagcctgcttagcttggaataagacttaggagaaaatggtgcttcactaacccgcttccggtccagtcacaatcatcatgtcactgtggggacccagatctgtgtcttgaagcagctgccctcattccgacttcagaaaatcgaagcagctggctcctccccttgttctctctcccaccctcccccaaatctgttttcatgtaaaagacaaataaatgatgacttcccccaaagct

SEQ ID NO: 2611 - DNA, 8267 bp, Homo sapiens
atttaaatacgcggcgccggcgagtgcgtcgagctcgccgcggactcaagatggcggcgtgtggacgtgtacggaggatgttccgcttgtcggcggcgctgcatctgctgctgctattcgcggccggggccgagaaactccccggccagggcgtccacagccagggccagggtcccggggccaactttgtgtccttcgtagggcaggccggaggcggcggcccggcgggtcagcagctgccccagctgcctcagtcatcgcagcttcagcagcaacagcagcagcagcaacagcaacagcagcctcagccgccgcagccgcctttcccggcgggtgggcctccggcccggcggggaggagcgggggctggtgggggctggaagctggcggaggaagagtcctgcagggaggacgtgacccgcgtgtgccctaagcacacctggagcaacaacctggcggtgctcgagtgcctgcaggatgtgagggagttgttgtggaattataagctgaacctaactacagatcccaaatttgaatctgtggccagagaggtttgcaaatctactataacagagattaaagaatgtgctgatgaaccggttggaaaaggttacatggtttcctgcttggtggatcaccgaggcaacatcactgagtatcagtgtcaccagtacattaccaagatgacggccatcatttttagtgattaccgtttaatctgtggcttcatggatgactgcaaaaatgacatcaacattctgaaatgtggcagtattcggcttggagaaaaggatgcacattcacaaggtgaggtggtatcatgcttggagaaaggcctggtgaaagaagcagaagaaagagaacccaagattcaagtttctgaactctgcaagaaagccattctccgggtggctgagctgtcatcggatgactttcacttagaccggcatttatattttgcttgccgagatgatcgggagcgtttttgtgaaaatacacaagctggtgagggcagagtgtataagtgcctctttaaccataaatttgaagaatccatgagtgaaaagtgtcgagaagcacttacaacccgccaaaagctgattgcccaggattataaagtcagttattcattggccaaatcctgtaaaagtgacttgaagaaataccggtgcaatgtggaaaaccttccgcgatcgcgtgaagccaggctctcctacttgttaatgtgcctggagtcagctgtacacagagggcgacaagtcagcagtgagtgccagggggagatgctggattaccgacgcatgttgatggaagacttttctctgagccctgagatcatcctaagctgtcggggggagattgaacaccattgttccggattacatcgaaaagggcggaccctacactgtctgatgaaagtagttcgaggggagaaggggaaccttggaatgaactgccagcaggcgcttcaaacactgattcaggagactgaccctggtgcagattaccgcattgatcgagctttgaatgaagcttgtgaatctgtaatccagacagcctgcaaacatataagatctggagacccaatgatcttgtcgtgcctgatggaacatttatacacagagaagatggtagaagactgtgaacaccgtctcttagagctgcagtatttcatctcccgggattggaagctggaccctgtcctgtaccgcaagtgccagggagacgcttctcgtctttgccacacccacggttggaatgagaccagtgaatttatgcctcagggagctgtgttctcttgtttatacagacacgcctaccgcactgaggaacagggaaggaggctctcacgggagtgccgagctgaagtccaaaggatcctacaccagcgtgccatggatgtcaagctggatcctgccctccaggataagtgcctgattgatctgggaaaatggtgcagtgagaaaacagagactggacaggagctggagtgccttcaggaccatctggatgacttggtggtggagtgtagagatatagttggcaacctcactgagttagaatcagaggatattcaaatagaagccttgctgatgagagcctgtgagcccataattcagaacttctgccacgatgtggcagataaccagatagactctggggacctgatggagtgtctgatacagaacaaacaccagaaggacatgaacgagaagtgtgccatcggagttacccacttccagctggtgcagatgaaggattttcggttttcttacaagtttaaaatggcctgcaaggaggacgtgttgaagctttgcccaaacataaaaaagaaggtggacgtggtgatctgcctgagcacgaccgtgcgcaatgacactctgcaggaagccaaggagcacagggtgtccctgaagtgccgcaggcagctccgtgtggaggagctggagatgacggaggacatccgcttggagccagatctatacgaagcctgcaagagtgacatcaaaaacttctgttccgctgtgcaatatggcaacgctcagattatcgaatgtctgaaagaaaacaagaagcagctaagcacccgctgccaccaaaaagtatttaagctgcaggagacagagatgatggacccagagctagactacaccctcatgagggtctgcaagcagatgataaagaggttctgtccggaagcagattctaaaaccatgttgcagtgcttgaagcaaaataaaaacagtgaattgatggatcccaaatgcaaacagatgataaccaagcgccagatcacccagaacacagattaccgcttaaaccccatgttaagaaaagcctgtaaagctgacattcctaaattctgtcacggtatcctgactaaggccaaggatgattcagaattagaaggacaagtcatctcttgcctgaagctgagatatgctgaccagcgcctgtcttcagactgtgaagaccagatccgaatcattatccaggagtccgccctggactaccgcctggatcctcagctccagctgcactgctcagacgagatctccagtctatgtgctgaagaagcagcagcccaagagcagacaggtcaggtggaggagtgcctcaaggtcaacctgctcaagatcaaaacagaattgtgtaaaaaggaagtgctaaacatgctgaaggaaagcaaagcagacatctttgttgacccggtacttcatactgcttgtgccctggacattaaacaccactgcgcagccatcacccctggccgcgggcgtcaaatgtcctgtctcatggaagcactggaggataagcgggtgaggttacagcccgagtgcaaaaagcgcctcaatgaccggattgagatgtggagttacgcagcaaaggtggccccagcagatggcttctctgatcttgccatgcaagtaatgacgtctccatctaagaactacattctctctgtgatcagtgggagcatctgtatattgttcctgattggcctgatgtgtggacggatcaccaagcgagtgacacgagagctcaaggacaggctacaatacaggtcagagacaatggcttataaaggtttagtgtggtctcaggatgtgacaggcagtccagcctgacctttctgcacactccagacaaacttcccagacaagctcctttgtgcctctacgtggagagggtgtggaaagttatcacattaaaagatggaggatttgctctgttttttttctttctgtccatttgctgcgtgtacccactctagtaggcattggctaaatgttgtattttggcgattcatcaacctttgcagaatatgggctttatagaagcaatattcttggccatcccgcctcattcctccagtgtggagatgacaagtctgggtgtgagagggaggggtccgggcatcatggttcagcgtggcactcctttggttgagtttggggcatgagatcacagtggctgcacaagagagcagtgtgtacagtaggagagacatttatgtaatatatattttattaacctgttagatgtccacaaagtattataaatcacgtgcctaaaactgtccatgtagaccaaggcctgccctcggcgccccccactcttgcctctgctctgcacagtccacgtgcactgcaggaccggagcgacacatgtcttccctgaagggtgttcagtacaaggcgtgtcagtttgtggatcagttgatccaagttactccttgtctaacctgactgacatatatttgaatactgtggttttctttcttttttttctatttgctgcccttcctggaggcagtgggttccagaagccaactgattgtccccctgccaagtcaccaagggaagctgctaagctgcttagtcccctcggtcctgcttgtagggtcttcctgattgtcaacagctgtctgggatgcttcagtctcctaaaactggaaacgcagggtgcgagcagcacacactgcctcccgccactgccagccggagtgagcggcccgagagtctctgcaggttcccctgggggctgggggccgctgaggcctaatatcaagagccaggaatgtcatgtacatggaggtgcctacggacgtgcctggtgtggtttgcaggtaggatggatgttcactgtttgaccgggtggggtatccttcctctctgcagtctccttcccagtatgcgtaaacacccttatagttctaattgtgttgatatttctgttctttctgaattgagagaaaatcccattcgttgtctgcagatttggaagtttgatgaggaatttggttcttgaaacatctgtctttttttttttttttgagacagagtatctctctgttgcccaggctgcagtgcagtggcgcgatctcagctccctgcaacctccacctcctgggttcaagcaattctctgcctcagcctcctgagtagctgggattccaggcacccgccaccacgcctggcttatttttgtatttttagtagagatggggtttcaccatcttggccaggctggtcttgaactcctgatctcatgatccacccgcctcagcttcccaaagtgctgggattacaggtgtgagccaccctgcctggccaaaacatttgtcatctttataaatggtcagaatagaaaagttagctctgccagtatcttcaattacttattacaagaatgtctttcatcatcttacttggagcattttccaatgactggctcttgagagccccaggcagggccccgagcaagtttttctaagtgccaaggccagcaaagtctgaactggccgcactcattaagtccctcatttggcaaaacaaaacagggcctggggcacccctggttcctggccttataggtcagtcaactggctgagaaatggtcaagaaaagaaacaatgacccttctgtggatgtgagtggatgatggactctggcctgtgtctactctcctgatgtgtagcccaccaacagtaatagaagtagagggtagggggttttgccaaggctaaggcttcaggtacttgctaacagttatagcagctgggtcactgtcatctggacttaccagttcatgccagtgtccctgtgacttatgcatagtgtgcgccacagccctctagaggtacctggagcccggactgccaggctggaggctctggggtactgaaggtgagctgtctgggcaaactattaagaacaagacgaactgttcacaatggagcttctcccacagatggggagctctgtgaggccttcacctgggtgcatgttggacttccattgctgttgctgttgtccctagacaagcccgttagcaagaagcaccggcaggggagccatgcactccataggcttgggatcacccccgggaaagcgatcttccccgggctaccacccccagctgcagttctgtgttagtgcatccttcaaagctaggagaattctagggtgaccagtgagctaatgttgagtgagcaggtattgacttgaacacactgcaggcctttggctgtctcatgctgtccttactcttcttgggaacagtgagtcactcagctggccagggtggggatgcatcctggtgaagagacagctttccctgaagatgctacagaaagttactgtcagatttcatttgtttctgtttcctgagatcaactaacagaagaatctaatggtgagagtgtcttcattcatgttttacgttttatcaaggcacactggaaagggaattatgtggctgacttcccttggccttcccaagagaagattctgttcttatgtcagtgtggcttctggaagtgtctcctatcctcccatcctccaggcctgtggtgtgacttctgccccgaagttcctactatagtgagtcatctggggagaggccactgaaaagaggccttcccttcccatttcctcccctgcctccttagaacacactctaagtcagaacttaatctaagaagaaggaagctggaccaggaaccttggaagtcagccagccctagaacagtcagcctaaattttggccgtaatggcttttttggttttttgttttgtttctgagatggagtctcactccgttgccaggctggagtgctgtggcgctatctcagcttaccgaatcctccgactccctggttcaagcgattgtcctgcctcagcctccggagtagctgggattacaggcatgcaccaccacacccagctaatttttgtatttttagtagagacggggtttcaccgtgttgtccaggatggtctccatctcctgacctcatgatgtgcccacttcggccttccaaagtggccgcaaagtggcccacttcggccaaagtgcacttcggccttccaaagtgcattacaggcgtgagccaccacgcccggcctggccttttttttttttttcttttgagacacagtttcactcgttgcccaggctggagtgcagtggcgcaatctcggctcactgcaacttctgcctcctaggttcaagcagttctcctgcctcagcctcccaagtagttgggattacgggcatgcaccaccatgcctggataattttttcttatttttagtagagacaggatttcatcatgttggccacgctggtttcgaactcctgaccacatgtggtccacccaccttggcctcaattatgtgcattttggtatatttacttgtatttcaacatcttgtgagtttgaaaaacctgaaaggccagaatgcttccttttatttctcaccatttgggcagcacctaagtggttttgtaaaatgcagcatctggtgctgtgggtctctctcaggccttgagggacacttccttcctccccactcgcctcctctccactagactttggttcctagagggcgtggggccgggtctgaggttcttgcctgccttccctcccattggtctttggttgctcatccctctaactgcaccccttcttggtccttcctccacagacttcagataatagataagtcattagcaaaccagaccgaatctttagggtgaagagctccccaaagccatctggtgaggtcattgtggggaccagggactgattatttgtcacctggatcacaaagatgggactgtctgctcaggctggtggtgacaggatcctgacccgtggtcctctcccgctccctctgctccaccaggacacatgtataggacactgtgctgtgtgcagtggagaaatctccctgggccaggggaaagttcagacagtgcctctagattgtgttttgcctcctccaatgtagagttgacatctggaccccagagcccagcagggctttctgtcagacatgctagggtggtagaaatgggccctccaggtccccctgcagtgcactgggcagagacctccggaaagccggcagcgggagcgcttcctgggcagcttcccccagcacagtgttcccaaaccagtccatccggaaaacagtctgtacagcaaatgctgtgtgagatcttaggcttttcactttttttgttttgttttgtttttgaaagaaagaaaaaaatacaattaacaagcctcttttgtaaatgggtttcctttctatgtataaaatcgtggtggtcccttgtttttacatgttcatgctgtgtaattttgagatgttactgagatatgttctgaacataatgtgcatttttttctgtacagatgaaatgggagaatttaataaagagtttgcaggtttttacttgttaaaaaaaaaaaa

SEQ ID NO: 2612 - DNA, 1278 bp, Homo sapiens
ggagtcgggttacaccacttgtgtctgagttcacgcagcatgttcctctgtcagggattccgcaaatatctccctgaggtaaaaaaggaaagtgtgctgcgctccagcacccagagcagtgagcccagtcccgagtcccggagagagctccagcaataggggccatgtcgccgtagccccagcctctcggtccgcagcctcagcagcgtcccagccggctggcttcatgctgcggtgcagctgcaccatgttcctgggttgagggggcaatcgggcacgctcctccccatgggttgcccatcatgtctaatggatatcgcactctgtcccagcacctcaatgacctgaagaaggagaacttcagcctcaagctgcgcatctacttcctggaggagcgcatgcaacagaagtatgaggccagccgggaggacatctacaagcggaacattgagctgaaggttgaagtggagagcttgaaacgagaactccaggacaagaaacagcatctggataaaacatgggctgatgtggagaatctcaacagtcagaatgaagctgagctccgacgccagtttgaggagcgacagcaggagacggagcatgtttatgagctcttggagaataagatccagcttctgcaggaggaatccaggctagcaaagaatgaagctgcgcggatggcagctctggtggaagcagagaaggagtgtaacctggagctctcagagaaactgaagggagtcaccaaaaactgggaagatgtaccaggagaccaggtcaagcccgaccaatacactgaggccctggcccagagggacaagtaggtgccttcggtgctctttttgtcgcttgtcttttgcccattctcaaggcatacagcagctgtcctgttccctttcaaggactgacagtaggagcttcactatttctaagactttatgggcccacaaccgaagacattcttttcagggttgaattttcagtggtatccattatgaaaactcacttcatggattcagtgggcaaatagcggcaagcaagagacatagattcacttattcagcaaacatttactgggcatgccacatgccagataccgggctaagtatctggcatgtgttacagaaacaaaagacctaattcttgtcaccaagaaacatgttacatgattttaataagttccctgatagaagagcatggggtgctctggggaaatattggagggtcatccattccacattaaaagagcaagttgtctgcaaaaaaaaaaaaaaaaaa

SEQ ID NO: 2613 - DNA, 2362 bp, Homo sapiens
ataagctgatgtggaacagaatggaatttcccatccaacaaaagaggaaagaatgttttaggaaccagaattctctgctgccagtgtttcttcaacaaaaataccacgagcatacaagtctgcccagtcccaggaagaaagaggagagaccctgaattctgaccttttgatggtcaggcatgatggaaagaaactgctgctacagcttgggagatttgctatggaaagtctgccagtcaactttgcccttctaaccaccagatcaatttgtggctgatcatctgatggggcagtttcaatcaccaagcatcgttctctttcctgttctggaattttgttttggagctctttcccctagtgaccaccagttagtttctgagggatggaacaaaaatgcagcttgccctttctatgtggtgcgtgttcaggccttgacagattttatcaaaaggaaactattttatttaaatggaggctgagtggtgagtagatgtgtcttggtatggaggaaaagggcatgctgcatcttcttcctgacctccggggtctctggccttttgtttccttgctcactgaggggtctgtctaaccaagcaggctagatagtgctggcacacattgccttctttctcattgggtccagcaatgaagataagtgtttgggtttttttttttttcctccacaatgtagcaaattctcaggaaatacagtttatatcttcctcctacgctcttccagtcaccaactacttatgcggctactttgtccagggcacaaaatgccgtggcagtatctaactaaacccccacaaaactgcttaataacagttttgaatgtgagaaatttagataatttaaatataaggtacaggttttaatttctgagtttcttcttttctatttttattaaaaagaaaataattttcagatttaattgaattggaaaaaaacaatacttcccaccagaattatatatcctgaaaattgtatttttgttatataaacaacttttaagaaagatcattatccttttctctacctaaatatgaggagtcttagcataatgacaaatatttataatttttcaattaatggtacttgctggatccacactaacatctttgctaataatctcattgtttcttccaactgattcctaacactatatcccacatcttctttctagtcttttatctagaatatgcaacctaaaataaaaatggtggcgtctccattcattctccttcttccttttttcccaagcctggtcttcaaaaggttgggcaatttggcagctgaattcccagacagagaatagagcaattttagggatattaggactgagggagggtgtgggaaagctgtcatcagttgtttttatagaaagaactggcattcattaagaacctaaatcttatctttgcacaaatggaaaatataacctagttatagcttcctttggcctttattaaagggtaatatcaatcacagtcatagcaaagaaagcggatgtattaatggcaaattaatggaaaacctcccttatcaggaatctagactcagaatttaggaacacaaatcaaatcagaccaaccaagctatagccaaggacttgaaagaaattaaacaagacccaggataaatcaaggaattagaaattgttatttaaaaatttcagattgtaactccaggccctgctgtctatattgcagccactaaaagctcactaccattagatttttgctaacatacatgtattcagaagaaagcctattgaaattttcattgtcttgtaaaaggttgtcctagtaaaatggaaaagatccttaagttattaatcagtttgaaaagcaaatttgtttttaagttttacatcagcagggcagtgtcttacaaaattcagaaattgcaaaggtggaaataattcacgctgatttgaagaacatcttctgtgcaataatactgcctctcttgaaaagcattggctgttttttctttttaaatatatctctagatgcttttaaatgtggctgtgttccctttaccaagattggcttcaagtttccgcaggtagagagacctgggcttgaacaagaggatgtgtttcatgtcctgctgaggaggtagaacatgtgcagcctgggtccgggactgcctccgtggggcaggggcaggggcggtaccattagggaggaagcttagcatttcagtttcttaaacaatattcagggtgatacactttttcttcccttgcattttagaataggctggtatctcatttgaacgggggagcagacttgatctcaaatgaagctgtgcccaggagccaggcttagcatattgagatttttatagatacctt

SEQ ID NO: 2614 - DNA, 3932 bp, Homo sapiens
gggtgctgggttttcacggagtatgcctgccctgccccgggaggactgtgtttgagcttggactcgctcgctgctgaattcctgtttgttattcttttttcttccaggctagctggaaggaccagctagcctggactttggcttctttgcccgggagccctggcatgatggggtgagggctcttggtgggttagtggagagctgggggctggcccttccccatcttcttttctacccaccccctccccgccccccgccaggcccagccaccatcagtcacgtcactcctgggactgaggaggcaggggagggataaggggcagagatggaggccccactccccgaggttgcctagacaacatgagaaatcgtggccagggcctcttccgcctgcggagccgctgcttcctgcatcagtcactcccgctgggggcggggcggaggaaggggttggatgtggcagagccaggccccagccggtgccgctcagactcccccgctgtcgccgccgtggtcccagccatggcatcctatccatctggctctggcaagcccaaggccaaatatccctttaagaagcgggccagcctgcaggcctccactgcagctccagaggctcggggtggtctgggggcccctccgctgcagtctgcccgatccctgccgggccccgccccctgcctcaagcacttcccgctcgacctgcgcacgtctatggatggcaaatgcaaggagatcgccgaggagctgttcacccgctcactggctgagagcgagctccgtagtgccccgtatgagttccccgaggagagccccattgaacagctggaggagcggcggcagcggctggagcggcagatcagccaggatgtcaagctggagccagacatcctgcttcgggccaagcaagatttcctgaagacggacagtgactcggacctacagctctacaaggaacagggtgaggggcagggtgaccggagcctgcgggagcgtgatgtgctggaacgggagtttcagcgggtcaccatctctggggaggagaagtgtggggtgccgttcacagacctgctggatgcagccaagagtgtggtgcgggcgctcttcatccgggagaagtacatggccctgtccctgcagagcttctgccccaccacccgccgctacctgcagcagctggctgaaaagcctctggagacccggacctatgaacagggccccgacacccctgtgtctgctgatgccccggtgcacccccctgcgctggagcagcacccgtatgagcactgtgagccaagcaccatgcctggggacctgggcttgggtctgcgcatggtgcggggtgtggtgcacgtctacacccgcagggaacccgacgagcattgctcagaggtggagctgccataccctgacctgcaggaatttgtggctgacgtcaatgtgctgatggccctgattatcaatggccccataaagtcattctgctaccgccggctgcagtacctgagctccaagttccagatgcatgtgctactcaatgagatgaaggagctggccgcccagaagaaagtgccacaccgagatttctacaacatccgcaaggtggacacccacatccatgcctcgtcctgcatgaaccagaagcatctgctgcgcttcatcaagcgggcaatgaagcggcacctggaggagatcgtgcacgtggagcagggccgtgaacagacgctgcgggaggtctttgagagcatgaatctcacggcctacgacctgagtgtggacacgctggatgtgcatgcggacaggaacactttccatcgctttgacaagtttaatgccaaatacaaccctattggggagtccgtcctccgagagatcttcatcaagacggacaacagggtatctgggaagtactttgctcacatcatcaaggaggtgatgtcagacctggaggagagcaaataccagaatgcagagctgcggctctccatttacgggcgctcgagggatgagtgggacaagctggcgcgctgggccgtcatgcaccgcgtgcactcccccaacgtgcgctggctggtgcaggtgccccgcctctttgatgtgtaccgtaccaagggccagctggccaacttccaggagatgctggagaacatcttcctgccactgttcgaggccactgtgcaccctgccagccacccggaactgcatctcttcttagagcacgtggatggttttgacagcgtggatgatgagtccaagcctgaaaaccatgtcttcaacctggagagccccctgcctgaggcgtgggtggaggaggacaacccaccctatgcctactacctgtactacacctttgccaacatggccatgttgaaccacctgcgcaggcagaggggcttccacacgtttgtgctgaggccacactgtggggaggctgggcccatccaccacctggtgtcagccttcatgctggctgagaacatttcccacgggctccttctgcgcaaggcccccgtcctgcagtacctgtactacctggcccagatcggcatcgccatgtctccgctcagcaacaacagcctcttcctcagctatcaccggaatccgctaccggagtacctgtcccgcggcctcatggtctccctgtccactgatgatcccttgcagttccacttcaccaaggagccgctgatggaggagtacagcatcgccacccaggtgtggaagctcagctcctgcgatatgtgtgagctggcccgcaacagcgtgctcatgagcggcttctcgcacaaggtaaagagccactggctgggacccaactataccaaggaaggccctgaggggaatgacatccgccggaccaatgtgccagacatccgcgtgggctaccgctacgagaccctgtgccaggagctggcgctcatcacgcaggcagtccagagtgagatgctggagaccattccagaggaggcgggtatcaccatgagcccagggcctcaatgagcctggtccatgaagtgcccaccacatcgcagcacttttaccacgttttgtcctcagaccccgcccatgctgtgtggtctctgcatgtctccattcttctctgtctctgtcttgcatgtctcctaccatgtcactgtccctgggccacccagtgaaagcaaagcctgggaatctgctcattgttgtttgggctcaggtattgagcctgatggcccaggtattgagggcctcccctgctggtggccctgtcctgggatcctcagaagcctgactgtcctatgggcttctccagtgtccacaggggcttgggatggttgtggggggctggcccctctagcctttccggtccttcctgggcaaatctaagccttggccagggccgaagtttaggcccctgtcttgttcatgtagccgaggggcaggcgggggacctctacacctctgctgtgggcacggggctgctgagggtctgtggaactccagcagctctgcactgggtagagctgggcctagagctcagtcacaggcctgggcttcctggcctgagtgggtagacgcaggcggcagaggtgctggaccacatctccgccaagtcactgcccagcagccttctccgtcctgtccccagcccacgtgctccttgggtgtcagcttcctgtgcctctgtgggagagggcagctgccttgtgttatgtctggggccacagttgctgcaaagtcctggatctgccactcaaccccgggagtggtgttcccagtgtggctcccagagctttgaccagattgtgatcccagctggcccctatgttgtgttctggactgaggcctttgctgtgaactgcagtgtttcatacgaaccatctttcctagtgcatgagaaataaagattatttaagtaatgagaaaaaaaaaaaaaaaaaaaaaaaaaaaaa

SEQ ID NO: 2615 - DNA, 903 bp, Homo sapiens
agataaggccgctcgctgacgccgtgtttcctctttcggccgcgctggtgaacaggacccgtcgccatgggccgtgtgatccgtggacagaggaagggcgccgggtctgtgttccgcgcgcacgtgaagcaccgtaaaggcgctgcgcgcctgcgcgccgtggatttcgctgagcggcacggctacatcaagggcatcgtcaaggacatcatccacgacccgggccgcggcgcgcccctcgccaaggtggtcttccgggatccgtatcggtttaagaagcggacggagctgttcattgccgccgagggcattcacacgggccagtttgtgtattgcggcaagaaggcccagctcaacattggcaatgtgctccctgtgggcaccatgcctgagggtacaatcgtgtgctgcctggaggagaagcctggagaccgtggcaagctggcccgggcatcagggaactatgccaccgttatctcccacaaccctgagaccaagaagacccgtgtgaagctgccctccggctccaagaaggttatctcctcagccaacagagctgtggttggtgtggtggctggaggtggccgaattgacaaacccatcttgaaggctggccgggcgtaccacaaatataaggcaaagaggaactgctggccacgagtacggggtgtggccatgaatcctgtggagcatccttttggaggtggcaaccaccagcacatcggcaagccctccaccatccgcagagatgcccctgctggccgcaaagtgggtctcattgctgcccgccggactggacgtctccggggaaccaagactgtgcaggagaaagagaactagtgctgagggcctcaataaagtttgtgtttatgccaaaaaaaaaaaaaaaaaaaaaaaaaaaaa

SEQ ID NO: 2616 - DNA, 4220 bp, Homo sapiens
tggcggtcttgcaggcgggcggaccctcggccgcgctcggggctccggcgccgccgctcctcctgctcggcctgagctgcccgggctcggcgcgcgcttggggcgaggctcggcgggcgcggacgcgcagcatggcggtggaggacgaggggctccgggtcttccagagcgtgaagatcaagatcggtgaagccaaaaaccttccctcttacccggggccgagcaagatgagggattgctactgcacggtgaacctggaccaggaggaggttttcaggaccaaaattgtggaaaagtcactctgcccgttttacggagaagacttttactgtgaaattcctcggagctttcgtcacctgtccttctacattttcgatagagacgttttccggagggattccatcatagggaaggtggccatccagaaggaggacttgcagaagtaccacaacagggacacctggttccagctgcagcacgtggacgctgactcggaagtgcagggcaaagtgcacctggagctgcggctgagcgaggtcatcacagacactggggtcgtctgccacaagctcgccacacgcatcgtcgagtgccagggcctccccatcgtgaatgggcaatgtgacccctacgccaccgtgacgctggcaggacccttcagatcagaagcaaagaagacgaaagtgaagaggaagaccaacaatccccagttcgatgaagtgttttattttgaggtgacccggccctgtagctacagcaagaagtcccactttgactttgaggaggaagacgtggacaagctcgaaatcagagttgacctctggaatgccagtaacctgaagtttggagatgaattcctgggagaactaaggatcccgttgaaagtcctgcggcagtccagctcctacgaggcgtggtacttcctccagccccgggacaatggtagcaagagcctaaagccagacgacctgggctccctgcggctgaacgtggtatacacggaagaccacgtgttttcttctgactattacagccctctgcgggacctgctgttgaagtctgcggatgtggagcccgtgtcagcgtctgcggcccacatcctgggcgaggtttgccgggagaagcaggaggcggccgtcccgctggtgcggctcttcctacactatggcagggtggtgccattcatcagtgccatcgccagcgcggaggtgaagcggacccaggaccccaacaccatcttccgaggaaactcactggcgtccaagtgcatcgacgagaccatgaagctggcggggatgcattacctgcatgtcaccctgaagcccgccatcgaggagatatgccagagccacaaaccctgtgaaatcgaccctgtgaagttgaaagacggagaaaaccttgaaaacaacatggagaacctacggcagtatgtggaccgcgtcttccacgccatcactgagtctggggtgagctgcccgaccgtcatgtgtgacatcttcttctccctccgggaggcggcggccaagcgcttccaggatgacccggacgtcaggtacactgcagtgagcagcttcatcttcctgaggttctttgcgcccgccattctctcccccaacctcttccagctcacgccgcaccacacggacccccagacgtccaggacgctgacattgatctccaagaccgttcagaccctcggcagcctgtccaagtccaaatctgcgagttttaaggagtcctacatggctacattttatgaattcttcaatgagcagaaatatgctgatgcggtgaagaacttcttggatctgatttcgtcctcggggagaagagaccccaagagtgttgagcagcccatcgtgcttaaagaagggttcatgatcaagagggcccaaggacggaagcgctttgggatgaagaattttaagaagagatggtttcgcttgaccaaccatgaatttacctaccacaaaagcaaaggggaccagcctctctacagcattcccatcgagaacatcctggcagtggagaagctggaggaggagtctttcaaaatgaaaaacatgttccaggtcatccagccagagcgtgcgctgtacatccaggccaacaactgcgtggaggccaaggactggatcgacattctcaccaaagtgagccagtgcaaccagaagcgcctcaccgtctaccacccgtccgcctacctgagcggccactggctgtgctgtagggcgccatccgactcggctccgggctgctcgccctgcactggcggcctcccagccaacatccagctggacattgatggggaccgtgagacggagcgtatctactccctcttcaacttgtacatgagcaagctggagaagatgcaggaggcctgtgggagcaaatctgtgtatgacggcccggagcaggaggagtattcgacgttcgtcattgacgacccccaggagacctacaagacgctaaagcaagtcatcgctggggttggggctttggagcaggagcacgcccagtataagagggacaagttcaagaagacgaaatatggaagccaggagcaccccatcggagacaagagcttccagaactacatccggcagcagtccgagacctccactcattccatttaaagtctgcgggacgcgcccagtggcgccagcaagctgcccatgcaaagccgcagcctttgggagggagaagagaaggaagagcgcagagccggcaaagtgagatgcacgccgtcccggcccatagacaagtggcgctggggtttccctctcccagaaccgctgccaccaccgccacgccctccgcagaaagcccacctggccctgtggaacgtgtcgtcatttgattctgtgctttttgctccttgtttgtggggatctggggatcagctgaaggatcaggaagtgtgggctgtgccctagccacaccacagccagcctcagggagccacggcccgtctagtcgactgtgacatgcacctccggccgtgtgtgcgtcagtctcgtgcacgtctgtcttgcgtgcacggtgcgtgtgacgctgggctctgtggctctgtgcccgggaggcctgctggccccgcctcggctttcggcttcatcacattgggaggttcagagcattactctcccactgtgcctgccatccaggcagccatgggaggcggcctccctgttccactttcgaggttcgtttgattcctggctgaggggtcagttttatggctgggaggtgcagaattacacagaagtcccagtctgaggatgtccttggtgcttgggggatacgggttctgtccacagagtcccttggagggaaaggtgtgggctccagcttctccaggcgtctgcggagcccacagttgaagcccacatcgttttgctgttgaatggggtttaaaatcagaattaacatttgccaccccccgtggaagtttgaagattttaaaaatagaaatgtacatttttcaagctgtttttctttatgtttttgaaggaccatttttaattagctctttgatacaaagtaactcagaacgtcaaaacctatacccactaaagggaaggctgccgggaaggcaaatggaacaggaatggagcctgtctcaggaaggccagctgcaggtcctccagaaaatcaaagaagggaagaaactctgagtttgaggtacaggggcttcggggtgcagacgtccctccagggcccatggtcagtattgcacctgtgttatgaacccccagatgctgtgcagggcaggggcgggggctgctgttttattggggaggggagcatcctaaaaatggggtccaggcagacccctccagacctcacactgccgaggaggcctttcccaaagggcgtcctcccgggatgcagacggcaggtgtgtgggaagcgccgtttaaatacacagcacgacgtatccttgtaccgacttctcccggttcttgtttgaaaatactgtagttcaggctcttgatctagatggcagataggaactttcttgtcacaaaaatactggaggaaaatgttgtaaaaatagacttttggacacacagctgttggggctgcactgagctgcaatttttaacatggatttataacttaatgtttctgtttataaaatactaatgatttgcaatgtattttactggccaattaaaacagatgttttattctttctgaaaaaaaaaaaaaaaaaaaaa

SEQ ID NO: 2617 - DNA, 2628 bp, Homo sapiens
gaccgcggcagctcagcctcccgccgattgtatgttccaggcctcaatgaggagtccaaacatggagccattcaagcagcagaaggtggaggacttttatgacatcggagaggagctggggagtggccagtttgccatcgtgaagaagtgccgggagaagagcacggggcttgagtatgcagccaagttcatcaagaagcggcagagccgggcgagccggcgcggtgtgagccgggaggagatcgagcgggaggtgagcatcctgcggcaggtgctgcaccacaatgtcatcacgctgcacgacgtctatgagaaccgcaccgacgtggtgctcatccttgagctagtgtctggaggagagctcttcgatttcctggcccagaaggagtcactgagtgaggaggaggccaccagcttcattaagcagatcctggatggggtgaactaccttcacacaaagaaaattgctcactttgatctcaagccagaaaacattatgttgttagacaagaatattcccattccacacatcaagctgattgactttggtctggctcacgaaatagaagatggagttgaatttaagaatatttttgggacgccggaatttgttgctccagaaattgtgaactacgagcccctgggtctggaggctgacatgtggagcataggcgtcatcacctacatcctcttaagtggagcatcccctttcctgggagacacgaagcaggaaacactggcaaatatcacagcagtgagttacgactttgatgaggaattcttcagccagacgagcgagctggccaaggactttattcggaagcttctggttaaagagacccggaaacggctcacaatccaagaggctctcagacacccctggatcacgccggtggacaaccagcaagccatggtgcgcagggagtctgtggtcaatctggagaacttcaggaagcagtatgtccgcaggcggtggaagctttccttcagcatcgtgtccctgtgcaaccacctcacccgctcgctgatgaagaaggtgcacctgaggccggatgaggacctgaggaactgtgagagtgacactgaggaggacatcgccaggaggaaagccctccacccacggaggaggagcagcacctcctaactggcctgacctgcagtggccgccagggaggtctgggcccagcggggctcccttctgtgcagacttttggacccagctcagcaccagcacccgggcgtcctgagcactttgcaagagagatgggcccaaggaattcagaagagcttgcaggcaagccaggagaccctgggagctgtggctgtcttctgtggaggaggctccagcattcccaaagctcttaattctccataaaatgggctttcctctgtctgccatcctcagagtctggggtgggagtgtggacttaggaaaacaatataaaggacatcctcatcatcacggggtgaaggtcagactaaggcagccttcttcacaggctgagggggttcagaaccagcctggccaaaaattacaccagagagacagagtcctccccattgggaacagggtgattgaggaaagtgaaccttgggtgtgagggaccaatcctgtgacctcccagaaccatggaagccaggacgtcaggctgaccaacacctcagaccttctgaagcagcccattgctggcccgccatgttgtaattttgctcatttttattaaacttctggtttacctgatgcttggcttcttttagggctacccccatctcatttcctttagcccgtgtgcctgtaactctgagggggggcacccagtggggtgctgagtgggcagaatctcagaaggtcctcctgaaccgtccgcgcaggcctgcagtgggcctgcctcctccttgcttccctaacaggaaggtgtccagttcaagagaacccacccagagactgggagtggtggctcacgcctataatccctgcgctttggcagtccgaggcaggggaattgcttgaactcaggagttggagaccagcctgggcaacatggcaaaacgcagtctgtacaaaaaatacaaaaaattagccaggtgtaggggtaggcacctggcatcccagctactccaggggctgaggtgacagcattgcttaagcccagaaggtcgaggctgcagtgagctgagatcacgccactgcactccagtctgggtgacagagagagaccatatccaaaaaaaaaaaaagttgccagagacgagtatgcccatgctccctctacctcactgccaccactcctgctgttaggagctgagtgtgtctccctaaaatttctatgttgaagtcttaacccttggtaccacagaatatcactgtatttggagatggggtctttagaaaggcacttaaattaaaatgagctcactgatatgggccccgatgcaatataattggtgtccttataagaaggggaggttaggacacgcaggaaagaccacatgaaggcccaggagtgggagggggaatagccatcgacaaactaagggggcctcagaggaaaccaaccctgctgacacctcaatcttagactctggcctcaaaaattgtaagaaaataaacttctgtcttttaagcca

SEQ ID NO: 2618 - DNA, 5402 bp, Homo sapiens
gcggccgcggcggcgggaggcggcgggaggcgggcggaggaggaggcggaggaggcgggagctgagctgagtggggcgggcggcggcggggcccgagccggagaagatggcggtgcggaagaaggacggcggccccaacgtgaagtactacgaggccgcggacaccgtgacccagttcgacaacgtgcggctgtggctcggcaagaactacaagaagtatatacaagctgaaccacccaccaacaagtccctgtctagcctggttgtacagttgctacaatttcaggaagaagtttttggcaaacatgtcagcaatgcaccgctcactaaactgccgatcaaatgtttcctagatttcaaagcgggaggctccttgtgccacattcttgcagctgcctacaaattcaagagtgaccagggatggcggcgttacgatttccagaatccatcacgcatggaccgcaatgtggaaatgtttatgaccattgagaagtccttggtgcagaataattgcctgtctcgacctaacatttttctgtgcccagaaattgagcccaaactactagggaaattaaaggacattatcaagagacaccagggaacagtcactgaggataagaacaatgcctcccatgttgtgtatcctgtcccggggaatctagaagaagaggaatgggtacgaccagtcatgaagagggataagcaggttcttctgcactggggctactatcctgacagttacgacacgtggatcccagcgagtgaaattgaggcatctgtggaagatgctccaactcctgagaaacctaggaaggttcatgcaaagtggatcctggacaccgacaccttcaatgaatggatgaatgaggaagactatgaagtaaatgatgacaaaaaccctgtctcccgccgaaagaagatttcagccaagacactgacagatgaggtgaacagcccagattcagatcgacgggacaagaaggggggaaactataagaagaggaagcgctccccctctccttcaccaaccccagaagcaaagaagaaaaatgctaagaaaggtccctcaacaccttacactaagtcaaagcgtggccacagagaagaggagcaagaagacctgacaaaggacatggacgagccctcaccagtccccaatgtagaagaggtgacacttcccaaaacagtcaacacaaagaaagactcagagtcggccccagtcaaaggcggcaccatgaccgacctggatgaacaggaagatgaaagcatggagacgacgggcaaggatgaggatgagaacagtacggggaacaagggagagcagaccaagaatccagacctgcatgaggacaatgtgactgaacagacccaccacatcatcattcccagctacgctgcctggtttgactacaatagtgttcatgccattgagcggagggctctccccgagttcttcaacggcaagaacaagtccaagactccagagatctacctggcctatcgaaactttatgattgacacttaccgactgaacccccaagagtatcttacctctaccgcctgccgccgaaacctagcgggtgatgtctgtgccatcatgagggtccatgccttcctagaacagtggggtcttattaactaccaggtggatgctgagagtcgaccaaccccaatggggcctccgcctacctctcacttccatgtcttggctgacacaccatcagggctggtgcctctgcagcccaagacacctcagggccgccaggttgatgctgataccaaggctgggcgaaagggcaaagagctggatgacctggtgccagagacggctaagggcaagccagagctgcagacctctgcttcccaacaaatgctcaactttcctgacaaaggcaaagagaaaccaacagacatgcaaaactttgggctgcgcacagacatgtacacaaaaaagaatgttccctccaagagcaaggctgcagccagtgccactcgtgagtggacagaacaggaaaccctgcttctcctggaggcactggaaatgtacaaagatgactggaacaaagtgtccgagcatgtgggaagccgcacacaggacgagtgcatcttgcattttcttcgtcttcccattgaagacccatacctggaggactcagaggcctccctaggccccctggcctaccaacccatccccttcagtcagtcgggcaaccctgttatgagcactgttgccttcctggcctctgtcgtcgatccccgagtcgcctctgctgctgcaaagtcagccctagaggagttctccaaaatgaaggaagaggtacccacggccttggtggaggcccatgttcgaaaagtggaagaagcagccaaagtaacaggcaaggcggaccctgccttcggtctggaaagcagtggcattgcaggaaccacctctgatgagcctgagcggattgaggagagcgggaatgacgaggctcgggtggaaggccaggccacagatgagaagaaggagcccaaggaaccccgagaaggagggggtgctatagaggaggaagcaaaagagaaaaccagcgaggctcccaagaaggatgaggagaaagggaaagaaggcgacagtgagaaggagtccgagaagagtgatggagacccaatagtcgatcctgagaaggagaaggagccaaaggaagggcaggaggaagtgctgaaggaagtggtggagtctgagggggaaaggaagacaaaggtggagcgggacattggcgagggcaacctctccaccgctgctgccgccgccctggccgccgccgcagtgaaagctaagcacttggctgctgttgaggaaaggaagatcaaatctttggtggccctgctggtggagacccagatgaaaaagttggagatcaaacttcggcactttgaggagctggagactatcatggaccgggagcgagaagcactggagtatcagaggcagcagctcctggccgacagacaagccttccacatggagcagctgaagtatgcggagatgagggctcggcagcagcacttccaacagatgcaccaacagcagcagcagccaccaccagccctgcccccaggctcccagcctatccccccaacaggggctgctgggccacccgcagtccatggcttggctgtggctccagcctctgtagtccctgctcctgctggcagtggggcccctccaggaagtttgggcccttctgaacagattgggcaggcagggtcaactgcagggccacagcagcagcaaccagctggagccccccagcctggggcagtcccaccaggggttcccccccctggaccccatggcccctcaccgttccccaaccaacaaactcctccctcaatgatgccaggggcagtgccaggcagcgggcacccaggcgtggcggcccaaagccctgccattgtggcagctgttcagggcaacctcctgcccagtgccagcccactgccagacccaggcacccccctgcctccagaccccacagccccgagcccaggcacggtcacccctgtgccacctccacagtgaggagccagccagacatctctccccctcaccccctgtggacatcacggttccaggaacagcccttcccccaccactgggaccctccccagcctggagagttcatcactacgtaaggaaagctccttccgcccctccaaagccctcaccatgcctaacagaggcatgcatttttatatcagattattcaaggacttctgtttaaaagatgtttataatgtctgggagagaggataggatgggaatgctgccctaaaggaagggctggtgaaaggtgtttatacaaggttctattaaccacttctaagggtacacctccctccaaactactgcattttctatggattaaaaaaaaaaaaaaaaagtagattttaaaaagccacattggagctcccttctacccactaaaaaataaccaatttttacattttttgagggggagtgagttttaggaaaggggaattaagattccagggagagctctggggatagaacagggcgcagattccatctctccccaagcccctttttagtgactaagtcaaggccccaactcccctcccccaccctacgctgagcttattcgagttcattcgtactaataatccctcctgcggcttcctcattgttgctgttttaggccaccccagctcagccaatgattcctttccctctgaatgtcagttttgtttttaaaagtcacttgcttagttgatgtcagcgtatgtgtatttggtggggaaaacctaatttcggggatttctgtggtaggtaataggagaagaaagggcactgggggctgttctccttccttccctgggctgtatccatggactcctggaaggcacagagaagggagctataagaggatgtgaagttttaaaacctgaaattgttttttaaagcacttaagcacctccatattatgacttggtgggtcaccccttagcttcctccctctcccaccaagactatgagaacttcagctgatagctgggggctccccagatgaggatgcagggatttgggagcagtggaagagggtgcccaaccttgggttggaccaacccttggctcgcagctcaactctgcttcccgcattcctgctccacgtgtcccagcttctcccctgtgacgggaaggcaggtgtgactccaggctctgcactggttcttcttggttcctcccaccaggccctttgttcctcatgtccccatgtttctctccctctgcgtcttagcacctttcttctgttcaaagttttctgtaaattttctctttttttctttctttcttttttttttttttataaattaatttgctttcagttccatcttgtgggtgcattctgtgttcttacctgtggctgtcaggcagggggattgtgatgggagcagctttcctggagtccttcacagcggcgtttacctgggccgaaagacactctgcaagccacacggcctacagacactgcgcctccccacaaaacacgaacggcagcacaactgtcgagactatgtgctggtataggagcagaggctctcacctgccctaaaagctgtttaagacttggaaggacattcccacaacatggaattttgtatctctgtcccttcagaagtagtggtttcactccttcccttattagagaggaggcaagccccttacctacttttgttataattggcccttcaccctgctgaggtgacggacaggcttaggcagtgctaataatggcctggctttagctccaataaacactccacaggcttccccacaaaaggccttattgggagcttgggagggcgggggccagatttaaggagctggaagggtagga

SEQ ID NO: 2619 - DNA, 2412 bp, Homo sapiens
aatgccgagtggtggcaagaggaggattagcttccactccgatttcaaagatccagtttacccactctacagcccagatatagtcacttatttcccctttccagccagagacttccgttccctgctggaacttccgatcccattcttctctcggtgggaatgcttgtggggggaaaaagaaacgcaatagataaagcggggcgcatgcgctcccggcacaggcttcgattgtgaggaaggccggctagtctccgagctcatcccgccttgcgcatgcggagaaggtaaaccagcgccccgagttgaggcgcgggtttggtggcgcgtttcagcgaagtcgcacgtgaaggatagcagtggcctgagaaagacccagtcatggcagcctccagcatcagttcaccatggggaaagcatgtgttcaaagccattctgatggtcctagtggcccttatcctcctccactcagcattggcccagtcccgtcgagactttgcaccaccaggccaacagaagagagaagccccagttgatgtcttgacccagataggtcgatctgtgcgagggacactggatgcctggattgggccagagaccatgcacctggtgtcagagtcttcgtcccaagtgttgtgggccatctcatcagccatttctgtggccttctttgctctgtctgggatcgccgcacagctgctgaatgccttgggactagctggtgattacctcgcccagggcctgaagctcagccctggccaggtccagaccttcctgctgtggggagcaggggccctggtcgtctactggctgctgtctctgctcctcggcttggtcttggccttgctggggcggatcctgtggggcctgaagcttgtcatcttcctggccggcttcgtggccctgatgaggtcggtgcctgacccttccacccgggccctgctactcctggccttgctgatcctctacgccctgctgagccggctcactggctcccgagcctctggggcccaactcgaggccaaggtgcgagggctggaacgccaggtggaggagctgcgctggcgccagaggcgagcggccaagggggcccgcagtgtggaggaggagtgagccggatgccccacacaccgccagtgtcataccaaagagctgagctgcttcggggccatgcagccctcctgccagccccctgcccttttcttgccctgtctctgaaccttcagaacattgatccttgccgcagccccactagccaagagaaacagagaaagaccattccccctgcctgtccttgcggccctgtcttctgaggttctctgtctggggttggctctcttaaccctttctctgctcccagcctgcctcaccagggaaggttggaggggcctccctctggcttctgcatctgcgccagcaaacatcactgccgttggtctctcatgacttaactggcttccctctgctgctgccttggcttcctcctaatgctcgtgctctcctgtccttctgaagttgctccttggccaaatctccagctcccttcttgttttcctcatcctcctaccctgtactcccaccaaaccatggtcctttaaggcacgctcctgtcctcctcattgcccagcagtagggaggggcaggggtaaggggacctgaggataaagggtggggaaacagggtcccctgaggcctgtgggggctgcaggggaggaggatgtaccttgtgtctctttcaagtgccttaatccgagccagcagggccttctgcttgcctgctgccatactgtatgtaggaaagtgttctgtggctgctttgtgtcaagaaaagagcagtcactctcagaatcttgattccccatcagccaaagcaaaagatggctgctgctttgtaggcatgtgcctgcaagtgggaccttgctgggcattatatgccctgtgggggtttcagagaccctgaaagaggagggaggacccgcctccttgtctgcacaactgcatgcacttctctccccatcgctccacaacctgaaaccgagaaggagttgctgaccagtgcccaccccggcagcccgggaggaacacaggcagctcctttcccttcacgtggtctgcagagagcagggtgagctgccagctgcccctctccaccagggtaccctgtcttggtggttaggggccacttttcctttgaggctctagtggaggtggatgtccttctctgccaggcttggcacatgatgtgaagaataaatgcccaattcttactgttcaggtttgatgtggaatcacagctgcagtgatatatattttttatcagtgcttggttggttttaaataaagtgcacgctattttattatcttgttctgaataaaatgtatttactccaaaaaaaaaaaaaaaaaaaaaaaaaa

SEQ ID NO: 2620 - DNA, 8150 bp, Homo sapiens
gtttacacgctccggggcctgtaggcgccgcgagttccggctgtcgccgtcgccgccgcggctcctggaggtcggttgcgacgagtaacggcgccaggacgagccctgcgccttctttttcgatatgtacccgaattggggccggtatggcgggagcagccactatccgccgccaccggtcccaccgccgccgccagtggcgcttcctgaggcctcgccggggcccgggtactcgagctcgacgactcccgcggccccctcctcctcgggcttcatgagcttccgcgaacagcacttggcgcagctccagcagctgcagcagatgcaccagaagcaaatgcagtgcgtgcttcagccccaccaccttcctccgccccctctgccgcccccgccagtgatgccggggggcggctacggagactggcagccgccaccgccaccgatgcccccgccacccgggccggccctcagctatcagaagcagcagcagtacaaacaccagatgctccaccaccaacgagacgggcctcctggtttggttccaatggagctggaatccccccctgaatctccccctgtgccgcctgggtcctatatgcccccatctcagtcttacatgcccccacctcagccgccaccctcttactaccccccgacctcatctcagccctacctgcctcctgctcagccgtccccttcgcagtccccaccttcccaatcctacctggcgcccaccccttcttactcatcctcctcctcttcctcgcaatcctatttgagccattcccagtcctacttgccctcttctcaggcatctccttcccgcccctcccagggccattctaaatcccaactactagctccaccaccaccgtccgccccccctggaaataagacaactgtccagcaagagcctttggagagtggggccaaaaacaagagtactgaacagcagcaagccgcccctgagccagatccctctacgatgactccacaggaacagcagcagtattggtatcgacagcacttgcttagtttgcaacagaggacaaaagttcatttgccaggacacaaaaagggtcctgtggtagcaaaggatacaccagagccggtaaaagaagaagttacagtacctgccaccagtcaagttccagaatctccttcttctgaggagcccccattgccacctccaaatgaggaagtgccacctcctctcccacctgaggaaccccagtctgaggacccagaagaagatgccaggttaaagcagttgcaggctgcagcagcacactggcagcagcaccagcagcatcgagtcggtttccagtatcagggaataatgcagaagcacactcagttacagcagattctacaacagtatcagcagattatacagcccccaccacatatacagaccatgtctgtagatatgcagctgcggcattatgagatgcagcagcaacagtttcaacatctttaccaagaatgggagcgagagtttcagctatgggaggaacaactccattcctatcctcataaagatcagcttcaggagtatgagaagcagtggaaaacatggcagggacatatgaaagccactcagagctatctccaggagaaagtcaattcatttcagaacatgaagaaccagtatatggggaacatgtcaatgccacctccttttgttccatattctcagatgcctccacctctacctacaatgccccctccagtgttgcctccttcattgccaccaccagtgatgccccctgccctccctgctacagtgccaccacctggcatgcccccacctgttatgccaccttctctaccaacctctgttcccccaccagggatgcctccttctctctcttctgcagggccaccaccagttctccccccaccttccctgtcttctgcagggccaccaccagttcttcccccaccatctctctcttcaacagcacctccacctgtcatgcccctcccaccattgtcttcagctacacctcctccaggaatacctccccctggagttccacaagggatacctcctcagttaacagcagccccagttccaccagcctccagttcacagagctcgcaagttccagagaaacctagaccagcactgcttcctactcctgtgtcttttggttctgccccaccgacaacttaccatcctccgttgcaatcagctggtccatcagaacaagtgaattcaaaagctcctttgagcaagtctgctctgccatacagttcattctcatctgatcaaggacttggggagtcttcagctgctccatctcagccaatcactgcagtgaaggacatgccagtgagatcaggtggcctgcttccagatcctcctagaagtagttacttggaaagtccaagaggcccaagatttgatggtcctcgaagatttgaggatttagggtcaaggtgtgaaggaccgagacccaaagggcctcgttttgaaggaaatcgccccgatgggccaagacccagatatgaaggtcacccagcagagggcactaaaagcaagtggggaatgattccccgggggccagcatctcaattttatattacccccagtacatccctaagtcctcgacagagtggaccacagtggaaaggccccaaaccagcttttggacagcagcatcagcagcaacctaagtcacaagcagaacctctttcaggaaacaaagaaccattagcagacaccagtagtaaccagcagaagaattttaaaatgcaatcagctgcattttccattgctgcagatgtaaaggatgtcaaggcggctcagtcaaatgagaatctaagcgactctcaacaagagccacctaaaagtgaagtctcggaagggcccgtagagccctctaattgggaccagaatgttcaaagtatggagactcaaatcgacaaagcccaagctgttactcagcctgtaccccttgcgaataagcctgtacctgctcaatctacttttccttcaaaaacaggggggatggagggaggaacagcagtagcaacatcatcattaacagcagataatgattttaaacctgtgggtattggtctaccccattcagaaaacaaccaagataaaggcctgcctcggccagataatagagataatagattagaaggcaatagaggcaacagctcatcttacagaggtcctgggcaaagcagaatggaagacacacgggataaaggtctagtaaacagaggtcgcggccaggcaatcagtcgaggcccaggattggtcaagcaagaagactttcgggataagatgatgggtagaagagaagatagtcgagagaagatgaacagaggagaaggtagccgggacagagggttggtgaggcctggaagcagtcgggagaaagtgccaggtggtcttcaagggagccaggacaggggtgcagctggcagccgagaaaggggaccacctcggagggctggcagtcaggagaggggacctcttcgaagggctgggagtagagagagaataccaccccgaagagctgggagcagggagagaggaccacctcgagggcctggcagtcgagaaaggggactgggaagatcagattttggtcgtgatagaggtccattcagaccagaaccaggagatggtggggaaaaaatgtatccatatcaccgggatgagcctcctagggctccatggaaccatggagaagagcgagggcatgaagagtttccattagatggtagaaatgctccaatggaacgagaaagactcgatgactgggatagagagagatactggagagaatgtgaacgtgactatcaagatgatacactagagctctataacagagaggacaggttctcagcaccaccatctcggtctcatgatggagataggcgaggcccttggtgggatgattgggagagagaccaggatatggatgaggactacaatagggaaatggaaagggacatggacagggatgtggatcggatttcaagacctatggatatgtatgatagaagtttggataatgagtgggacagagattatgggagaccactggatgaacaagaatcacagtttcgtgaacgggatattccatctcttccacctttaccgcccctcccacctcttccacctttggatagatatcgggatgatagatggagagaagaaagaaatcgagagcatgggtatgatcgagatttccgtgataggggtgagttgaggattcgagagtatccagaaagaggagatacatggcgggaaaagcgagattatgttcctgacagaatggactgggaaagagaacggttgtcagacagatggtacccatctgatgtggatagacattcccccatggcggaacatatgccctcctcacatcattcctcagaaatgatggggtccgatgcaagcttagactctgaccaaggccttggaggggtaatggttctcagtcagaggcagcatgaaatcattttgaaagctgcacaagaactgaaaatgcttcgggaacagaaagaacagcttcaaaagatgaaagacttcgggtctgagccacagatggctgaccatctaccacctcaggaatcaagattgcagaatacatcttcaagacctggaatgtatccgcctccagggtcgtatagacctccccctcctatgggcaaaccaccaggttcaattgtaagaccctctgctccaccagcaagatcatctgttcctgtgaccaggccacctgtcccaataccaccacctccacctcctccacctctacctcctcctcctccagtgataaagccacaaacttcagctgtagaacaggaacgatgggatgaagattctttctatgggctctgggatacaaatgatgaacaaggactgaattcagaatttaagtcagaaactgcagcaattccatctgctccagtattaccacccccacctgttcactcttccattccccctcctggcccagtgcctatgggtatgccaccaatgtccaagccaccaccagtacaacagactgttgattatggccatggccgagatatatccactaataaagttgaacagataccttatggagaaagaataactctacgcccagatccactacctgaaagatcaacttttgagacagagcatgcaggccaacgtgatcgttatgatagagaaagagatcgtgagccttattttgatcgtcaaagtaatgtcatagcagatcatcgagattttaaaagggatcgtgagacacatagagatcgagaccgggatcgtggtgttattgactatgaccgggatcgatttgacagagaacgccgaccccgagatgatagagctcagtcatatcgagacaaaaaagaccattcctcatccagaagagggggttttgataggccatcctatgaccggaagtctgaccgaccagtctatgaaggaccatccatgtttggaggagaacgaaggacttatcctgaggagcgaatgcctctgccagctccttcactgagccaccagcctcctccagctccacgagtcgagaagaagcctgaatcaaagaatgtggacgatattttgaaaccaccgggccgggagagcagacctgagagaattgttgttataatgagaggattacctggcagtggaaagacacatgttgcaaaacttattcgagataaggaggtagaatttggaggacctgcacccagagttctaagcctggatgattacttcatcactgaagtggaaaaagaagaaaaagatccagattctggaaagaaagtgaaaaagaaggtaatggaatatgaatatgaagctgagatggaggagacttaccgcaccagcatgttcaaaactttcaaaaagactctggatgatggcttttttcccttcatcatcctggatgccatcaatgacagagttaggcattttgaccagttttggagtgcagcaaaaaccaagggatttgaggtatatttggctgaaatgagtgcagataaccagacttgtggcaagagaaatattcatggaagaaagcttaaagaaataaataagatggctgatcactgggaaactgcacctcgtcacatgatgcgtctagatattcgttctttgctgcaagatgctgctattgaagaggtagagatggaagattttgatgcaaatatcgaagaacagaaagaagaaaagaaagatgcagaggaagaggaaagcgaactgggttacattccgaaaagcaaatgggagatggacacatctgaggcaaagctagacaagttggatggcttgaggactggtactaaaaggaaacgtgactgggaggccattgccagcagaatggaggattatcttcagctccccgatgattatgatactcgtgcttctgagcctgggaagaagagggtcagatgggcagacctggaagagaagaaggatgcagataggaaaagggccataggttttgtggtcggacagactgattgggagaagatcacagatgaaagtggtcacctggctgaaaaagccctcaatcgaaccaaatatatatgagacttagtttttgaacggagtcattattcctctaaggtggttcgctttgaggtggtctgaagccaaggcctcgcggagcttctttgtgtgtcaccttgcttccacgtttcagttcttgttttgtttctactgctttagttttttttaaagttctccagtgtccccaagaggtattagaatcttgctgtacccaagcaagacgttaatttttcttttaactgttttggggagggagggagtgatagcttaactgctgaagccaggcgggggtctgctggaggattccaacagagagtatttcctccactgtacaatgtcacagactatctctatcatcattgctttgtggctgtttctgttttttactgtatgtaactggtagctgattgtactaggattaaaaacaataaactttcatgataaagccgatgagattcatgggctatacagcatgggcccttttctcttgttttcttaattttatttttaattgctttttaaatatggtatgtcctaattaaatgctagctgaacatcccaaaacctttttttcattgaatattatatggctcaatgattccgtagcacatgttgtaaaacacagggttcaaatgatgttcaaaacactcatctttgttttatagctgatttctctatctttgtgtcttgaagactgaccaagttcaaatattcatcagttccctggagcatatccattctgtaacatgatgctttatttaaaaattttttttgatcctctctctgttcttccctctcttctttccttccttcttcttttcactttctgcctttatgctgttaggtttttattttttcctgatctggctttgaattctggtagacagaactgatgtattctgtggaactcaagcttgttgccttcatttgaacttgaattgtggatttttaaatgaagattgcagggaaagagtataaagatgcagagcactctggcatgtaacctttaagcctgtcaggttttcaagttcttgccagattgttcattactggaaagcatggccttctgcacagaatttcctctcttgtggttaataccaggtggaacccagaaacatacagagataaaacccaaatattatttctatgtaaacacagaaaagggactcttccctttttcatcctgcaaagaaaaaagtcatcttttagcatgaaagaagatgagagagccttcttcctcaagcataatttgcattttgtaatccaactcagtaatttgtaaatgtgttcactgaagacttcaatattttgaaatattctctttcaggccacagatgaaaatcctttacttttatgacctacattaaagactgtatgaatagagctaatagttactagcatttgaatagtatcactttgggttcaacaaattgatattatagtactgaatacccctaatttaatggaaattctaacaactttctgtacttttatcttccctgaaaatctgaatttttaagcaagtgactttaagttcattaagtcaatattgaatgtataaattgctacattaaataacttctgctgtttgtaaaaaaaaaaaaaa

SEQ ID NO: 2621 - DNA, 414 bp, Homo sapiens
  misc_feature (3)..(3): n is a, c, g, or t
  misc_feature (49)..(49): n is a, c, g, or t
  misc_feature (273)..(273): n is a, c, g, or t
  misc_feature (281)..(281): n is a, c, g, or t
  misc_feature (355)..(355): n is a, c, g, or t
  misc_feature (388)..(388): n is a, c, g, or t
tcngacatagtttatgatatgaataatctccccttccattaatactttntttattatatgagttagtttcttacatggttttccatagtcacatttgttaaagagtccagttgatgggcaaattagcaatcttatcctgggatgcatgaagactttccaaggaaaacgcagacaaggaacattctatccacagatagcagaatacagtgttttcaaatgttcatggaaaatacaccaagacagaccatagtctgaaccactaagaaatctganaatttttnttaaatttgaaacatatagagtatgttctctcaccaccatgggaatcaaacttagatatccataatggaaaganaataggaaaatctctggacacttgaaaagtgancagtatgtttctaaatagtgggttca

SEQ ID NO: 2622 - DNA, 2167 bp, Homo sapiens; identical to SEQ ID NO: 683

SEQ ID NO: 2623 - DNA, 1835 bp, Homo sapiens; identical to SEQ ID NO: 2029

SEQ ID NO: 2624 - DNA, 5285 bp, Homo sapiens; identical to SEQ ID NO: 202

SEQ ID NO: 2625 - DNA, 6120 bp, Homo sapiens
acttccgctgtcccgcgaagggcggggggagcgaactgttgtggtgcggagcgttcggcgggcggcggccgggcggcccaggggctgccgcgggactcggggcgcagccgagtggctgcaggggtggagtgggccggacgagccgcggggcccgggtgccgcgggttcgaggccgggccccgcgcgaggaggccgcgccaccccgggggagctgcccggcagcgagtttgccccgctgccgaaagaaggcgggagccggcaggggccttcgaaaccccctggcaacccaggcccggagtccttggggagcggctgtttcctgggacgccctcccggacacccccgctgcagggttacggttctgggcccccggcagaaggctcctccgggtgacccccggcggggccctgcgagccgcgggagccgaccccggggcctcgagccgggaggaagggggcttccggaggcggagggccgggggccgagggagccgggcctctcggacgcggggcagggcagcgcccgggctggagacggactctgggaccctcggctgcgggggtctcagcgacctgccccgcggcaagcgcggccgcggagtggcctaccggggaccctcccccagagggaccggcccggggcggggagatgaacggcttcagcacggaggaggacagccgcgaagggccccccgccgccccagctgccgccgccccgggctacggccagagctgctgcctcatcgaggacggcgagcgctgcgtccggcccgcgggcaacgcctccttcagcaagagggtccagaagagcatctcgcagaagaaactcaagctggacatcgacaagagcgttgatctgttccagctgcaggtgaacaccctacgacgttataaacgacactacaagttgcagaccagaccaggcttcaataaggcccagttagcagaaactgtgagtcgacacttcaggaacatacctgtgaatgaaaaagagacccttgcctacttcatctacatggtgaagagtaacaagagtagactggaccagaaatcggagggtggcaagcagcttgagtgaggatgaagcacatcttaaaggaatgaagtgtaatgcttgatgcacaggtgatatctactacatttaagcccataaagactgttaaatattattgtaaataaaaaagtttgaatgatgaatactgtaaatctttttggtcaggaggattatattctcatgattcagcatgtgtatagaaagactttcttttacgataactctggactaaaaaaatcaggatcattaaaagaattaaaaactatgtatttcagcattcaacaaagcattaaatcaattctactggaaatgtgggataagaaatattttggtaatcaccttatccaccaggctgccacgtgtgagctgtagcttggaatagcagcaaggtgcaattggccatggaagtgcatgagcagacccacatctggacttgcatgctgcccgctggcgacatagatatcccgcccgctttgttgcaagctttgtcatttatcagcagatcagtttgacactggtccccctcactcaccctgtgccttgtacacagtaggcactcaatcagtaggtattggctaattgagctgtcactaatagtgccagccttgtaacatccgcttcacacctctcatgactgagacctctgccatttctgttgctcaccacttaactgctagaatgtggaggaaatcctgatgcaccaacaaggaagtttctgatcagataaggatttcaggacagttgcatgtgcaaaactattcgttgaggttccagaaacactgatatagagaccctcacagaagatacggtcccttatgcaccccactatgcttcactctttggggtgcagttagatattatgacttcagccaagcttcttggtaataaatgcattgacacactgacatatttagtaggttggggcaagtatttttagaagttttcatcctaagttcacaaccaccatgcaagctgccaggggccatgtgattcctgcccagaagttcagcttaggattgaaagtctggctggccttgactccctgggctctggtcatcagcaaatcatgagtttgggcaacaaaggtcaattccatctgatgctcatttttgtgaacaatttgcctccctcttagggagaaagattgctaaaataatttttgaaaattacctaatttttttgttgttcaaaacgttgaactcctcaatctaattatatcagagccaaagtatcctgtgaaaacaaagctttatatccaaaaatgtgcttttgcaaaattctttaatctgtgtaatggagggcagagggtatggggtaggagggtgggagaaagaaaagaaaagaatttggattctaatttatgaccatcttgacatatggtcaaaggtgtcattttcctactcagtttcaattctgagttaatttcttaagccttaaataataagaacaatggacagcctggcctggcagagagtttcacagatgacttaatctgagcaccatcacagagaagtcaggactaaaccccctactgagcagggcggcggagtgtccaaaggtctcagttctgtggagcagagtaccacgctttctgtggaatggggacagggtcaccacgctcactaaaatgcagtatgttccattgcagcaaagctttcgcctgtgttcaaaatgcatgtctagcagattgcagccttttaaattaaatatatataaatggttgtatatagaatatactctggactgtgagggcatcctattttggtatgcctcctggctgtggatggcatgtccagtgctctgtgagtgttttcagtcattcacattcactatgtgtttagagattctctccctgcttacagctgaaggatgttgatacaggcatcaagaaggctgaggggcagatggggcctgcaggttaaggcattgttaacttgctccatggaaatgtccatatcttaatgagtaaaaaagtgtatttttctgatacgtaaaccagaattgtgggcgtgtaggtcacatcactatttctttagcagcaaatctgttttcccagttgagagagacaatagcttctgcacaagaatatatgatggtaggatccatctgttcaattgtgtctgaaagaatctttattccaaagcgaaacctggggaaatgttttaccttcagccagatgctgtgtgtgtacttgggtcccttgtctttcctctaaggagaggtgcttgtggaaagtggaggttgtgggcatcttttcaaccttttcaatctgacctttcaacaggtcaggtgagagaaaagacaaagctatttgaacctatgtttttcttatgtccagaaatctgttctttcatcaaaccactaaaccactcgccttagcctcttctgcagtttctggtggctctatctgtgggcaagggactcctgcctgtgagaagtggccaggccctccagagcaacggggtctggcttcagggagcagtggggtgtggggaaagcaatgttcatcttggctgctccatttttataccatccatcaaggactcttgcgcttctctccacctgtgacgtagcagcattgccttctttcctcttggtgcttctgggcaaaactggaatttgaaatccagaactggcgttgtcttcttaaagagtatggttcctgcctcagttccagcctggtatggttctttgatatgccctgaaggttctcacatggaaacatcagtatcctgccattcatgttgttttaagatgttttaaaaaccaatggacaaacttcttgcttcaaggaacaaactcttaggttggcaacagcatataaaaaaaaagatcacagctgaatctcatgaaagattaaaaaccaaaggattcaagaccggtgttgtaaaatgaagaggaattttacttacatgttacagctgccaagtttttagatgttcctgtcatagctaaatagtcactgctagcctttcagagaacagatagtaacaattgtttgcagctgcagtgttgcatctaattttggtgtttaggctttttattttgtgggaagctttttgttaatatcctgcagggcaactgcctgttgggagggagaggatggaagaaggagcttactctgggggccttgcctattgagggaggctgttgcccagagcagttgcttcatggaagtcatccaaaggcgctctcagtcattacaatgacaggatctcaaagttgggaaagggctgttaagtcatccagtctagtctccacataggtgctgacattctgcctacaaccatcccaccaaggggttgagcagtctggacttaaacacctccgaggacagagaacccactacctcgtggagaagcctgttctttgtaaacctctggcttttctatgttctctgtaatttccatcttagtctctgccccatgggggccacatgggacaagttatttttggcaaagcacctaattgctggcactgtcccaaagcatagcgtttgccttttggaaagaaacaatgctaggacatggacactttggtacactgtccttacccctgagtattagtccactcagttccttgttggagaatgttgagaaaaccctactggctggcttgtttctgccaaagcttggggagaggagagggggatgagaagatgttagcagcctgctaaacctcagacagatgaggactcagttctgtgcttgccccacaaaaacggatgctcacatcatcaggaaattgttcagctggaggatttataacttcgttgctttgcatgaagtttaaagttttcatggttgcccagggcttgtaccttagattcctgtaaggactttgcactgtttttgctgagaaaacaacgcttcaggacttaaggtctaagcgtcagagaagtgccgtattttcaaggtggaaagtctgttaagcttgctgttgtccaatcatccgtttttagagatggggaaactaaaactcaaaaagatgtgcctgaggtcatatggcattatcagaaccaacctctggccctcttgacctgtctagcattctttctttctgacctataggatgactctaattcagtctaaatcggctgccctcagattcttgagaacttaaaattgagcagaaattcccaaggccaacctagctctcagggaccaacctgcagaactcaagattgagcgaaatgtttaggccagttgagttttgcaaaatgagtggtaagggaaaacagatctagcctgttatttaaaaccagggttcaaaagccctattgggagaggtagtattgtcctagcatttaaattctcatgaaatgtgcttggtctgtgatctcttggtcagatatctgccttccaggcgatcctttgaggttgtgtaattcagctggccctggctcctggtccctgttactgagctgggcagtcgaaccgaagggcagatgagctcaagatcatgccttgggaagcatggtgctctaggggtgcctttttattcctttcattgtattatagactgtttccaagtttatggttagaaatggtaaagtgggtctggtgttttgaggtagaacccagcctagggcaagatatgaactgttcttgaggtagaaatgtctacagtcagttgtttcatctagcttgcatcttaaaacacaaacccttcagttgctttcacttaatgcacacatttgccaatgacagagggttatacaggatccttcttttacatttctattgtctgctacgctcatcagagtatattttggggtacaaggttttgggggttttttttcccattttgtaactgccttattgaaaagtaagtgcccttccattccaggcctcctcatattgtacttgtttcctgccaaatctgggggatcatttgtattttaacttcgtaatctatggctctgtactgttgaaaggctctcaattctgtggggtctccttagtatgtatgtgacttttcatgttgcaatatcacacgatgggatggcccgacttttgctcttaataaataatctgaatgagtaagagaaaaaaaaaaaaaaaaaaa

SEQ ID NO: 2626 - DNA, 4595 bp, Homo sapiens
attagctactgagcttagaactcttgacccatgagattttttttttaaatttttatttttatagaggcagggtcttgctatgttgtcaggctggtctcaagctcctggcctcatcagttctcctgccttccaagtagccggaactacaggtgtgcaccattgcacctggcctcatgagtattttagttagataagatttgtttggttcagtgggtcttagttttttaagacctgttaatttgtaattagacatcttgggccttaaactgtatttttgttttagtggtgaggttgggttttactttgtgtattccagcgttctcaactttgtcagatattgctagggaccagtgagatagataatccaaaaataataatttgactttggttgagtatgtcattaccacagtgttagttgaattgcactttaggttagaaaagttaattttcacatctgtgctgcgggttaggtgatattgtcctcagcacaatagatgaggaagaaactgaatcagaacagttaaatgacaggcttccaagtcatccatgtagcaaggagcacatttgcctcccaaactgatgctttttctctagaaccataatgcccccctaattacatttcagtagcatagaccgcaatgaacttcctactgtagggagacttgagtctggaatacattcagaacaaggttaacattacagttcttaatttcctttagggcaaacaagataattaaacttgggttttgtgagtctttttttgatttgcagattatatatggtaacacaataatggtggtttgtttttaagtttttttctcatcaggtttgataatttaatgcaaacttcaaatctggatgtgaataataatatttttattatagtataatccaggtgagtttatagaatttgtgttttgtgcttataaactgtcaccttctgatacttttcttcatccctctatttgaaaaacccttgtagaatttaacgatttaatggaaaatgttgcactttatagaaggccattttagaacttacaggtaacctttttgaagagcttagatttgtagaccactgtttatgctgagtgacatttcttttaaatggttgcatttgtcaaatctataaagatgttttttatattgcagttttctttttgtgctacttaaaggaatctttgcaatgctgcatatagataattgttgacctttttagttcagcagtttttaaacttgaagtaacatcagcatttatttgaatattaggttttagctaactgcctaatgtaccaaaaaaaaattagcaatgtcttatgtgggatgaggggttaagttaaagttgctgatcaagtaatggccgtgtggcacaagatgataactaagaatttctggttctaaggtagtaatgccttttgggatttatatttgtttaatgttgagattctggggaccataggtgggcttgtcaactcttaacagactatagtaaaggagagatggtggcacatgtgagataaaacttgtttatatttacattcttattagtggatagatatcacctcagtacaacactgaaattaaactgccttgttcatgctttcatgtctcaaatcaaggcctaaatgagtaaaaagatgattacagattacctaaaacccttaaccagttttggtttttgattatgcatatgtgttggcttgcaattaggtttttagtttctgtttatgtgacttgtttgaaaacattggattcgtcttctctccacagtttctacttgaacctagtagcttattttaattccctgtaagaggaaaataatatagggaatctgttcaactattcctttaataaatcatgtgacttggccaattacagaaattcctaagtgtagtattttgaaatgtggccagtgtcccagatttgtaaggtacagtgtgcatacagtgtgtcttaggatttttttaagtaaattaaggatgtttaccagaaattattgatttactgaaccaagtatttattttcagaagcccacttttggggaaggttgcctatatttttgatagtaattagatggaagattaaatcctgtttaacctggatagaaacagttttaactattgctgaagttaaaatcactttggggtggggtggggtggctcatgcctgtgatcccagtgctgtgggaggctgaggccagaggattgctcgaggccaggaatttgagaccagcttgggcaacatagcaagaccctgtctctacagataattgaaaagtgagccagatgtggtggcgcattcctatagtctccgtctctcaggaggctgaggcaggagattgcttgagcccaggagttggaggctgcagtgagttatgatcataccactgcactctaacctgggtgacagagtgagaccctgtctctaaaaaacaaaaaattagaaaacaacaaaaaccacttcggttactcactgtcctcatgctttgatgtcagttgttctcctaaattttaaaattttgttatgaagattggatgtacactgatttggccctttaaatgacattataccaagaagttggtataagggagtaggagatgagaaaactttttgaaaaatcatttggtgcatgctaaggtagcttgtaggacatgtggttttaaaaaattcatggattttgaagaaggatagggtggaagtaaaatttagctgatagcatagggatcatttgtgatttatatagaaaataattatatttttgagtgagaagcatcagacttaaatttttttcttctattttggttattaccaaaaggaacagagaaactctcagaattctttgaatcatagaatgttagtgctggaaaggactaggaagtgacttgtacaaccccttcattttacaaaggatcagagagaattggttagtagagtcccaaatctgcttttagaagtaatatggtgatcatcagtttagattcactgtaggaagggcagccctgttaaagtttgtcaggagaaaaagggaaggtatcactttttgtatgttcacccagttgcttctgtagttttcatacccctgttttctcaattttcttagaactgtctttaatggcccagctctaccagggcttgttgtctaaggacattaacttgtgctcccctcagggatgggtttactactagctgtcagaaagctattgggtatcctaatgtgttaatagctgaaactcagctgtaatttctcctaaatacttcagcattttgcattctgtacattgtggtgctttttccaccttgtattgttgtaactgtaagctcctagggggcagcaatttggtcttaggcgtgtaccctgtttagtgcctggcaatgccatgtttatatcaaggtcttaatattacttttgagttatttctcccactcttcatggaagtgatgctccagccttgctaaaacactgagggtcctcccgataagccaggcattgtgattccttggcttcaagtgccctctgtcttccccgaaggtccactgagatctacaatcccccctttcctctgatctcttgccatgtaagtaattttttaaaagatcagtacaagagctatattttttcctaagaaaaaatttcaacaggaatggggagtagccccgttttggggctgatctgtccagaatttggagtgaggaacaaatccattctcatctactttccacattttccctcttgtttgaggtcctgttccaaccttcatttctgaaactgttctagagcactttgtctttctcgtagttcataacttaccccttcagtctagaattagaattacattatctgttttactactttactagactgtaagctcctagaagataaggactagggagttcatctctgtattccaccagaaggtacagtgactcataactagagtctttagatgaaacttactgagttgaataacttaatatatttctgttttcattcccaagggaggccatgtctggagatagaccttgaatttaataaattttaggcactataccatttcagtggagaaaattgttgggaaatttggggggatggatatataagggggaggaagtcactggccagtttgaggtgcttccattggtctgggtaactagccatttcttcctgattgtgcctagtatatcccagacagtttgtttctatgcagaagaattttatatgaaattttcatttctttgcaaaaacttgttccttctttcagttcatgacatcatccatgctaaagtctgagtcatctgcttccatttttgttattccccacatccagtcttcagctaagtcctgtcagttctacctcaagtctttcccgtctttcttcctcacctatgtaatttcagtagtctctcagcttcacttaaccttactccagcctactttatacacaatgttagattcatcttactgaaacatagttctgaccatgtattccatgtatgtgttctctctcccctattagactgtaagctccttatgggcaggatctgtgtctgagtcatctttgtatcttgcctagcacctatcaataaatacttcttgaatg

SEQ ID NO: 2627 - DNA, 2287 bp, Homo sapiens
aagaagaattgacttccttctctgcagagccggctctggtctcttctcttgaagcagatgcgaaggctccccgaatgagaaagaatactcggaatcagcggtgaattgcagtgatctttcagagaaagcgcctgttcaactttgtcctctctcagagactcagagccttggggcactgagggatgccagttctgcctgttcatctggaacctggatctaaggagggaagaggcgttgcccctgctggcatagtcaggtattgaacgggctgagcttttcatgatggttcctgctgacctggaaacatcttaaatggaagggcgtgagcgcttggtccatgcagtgaagctcttccaacctgggtcaacgaaaacggagaagaaatggcccaagaaatagatctgagtgctctcaaggagttagaacgcgaggccattctccaggtcctgtaccgagaccaggcggttcaaaacacagaggaggagaggacacggaaactgaaaacacacctgcagcatctccggtggaaaggagcgaagaacacggactgggagcacaaagagaagtgctgtgcgcgctgccagcaggtgctggggttcctgctgcaccggggcgccgtgtgccggggctgcagccaccgcgtgtgtgcccagtgccgagtgttcctgagggggacccatgcctggaagtgcacggtgtgcttcgaggacaggaatgtcaaaataaaaactggagaatggttctatgaggaacgagccaagaaatttccaactggaggcaaacatgagacagttggagggcagctcttgcaatcttatcagaagctgagcaaaatttctgtggttcctcctactccacctcctgtcagcgagagccagtgcagccgcagtcctggcaggaaggtcagtgcaccagatattctgaaacctctcaatcaagaggatcccaaatgctctactaaccctattttgaagcaacagaatctcccatccagtccggcacccagtaccatattctctggaggttttagacacggaagtttaattagcattgacagcacctgtacagagatgggcaattttgacaatgctaatgtcactggagaaatagaatttgccattcattattgcttcaaaacccattctttagaaatatgcatcaaggcctgtaagaaccttgcctatggagaagaaaagaagaaaaagtgcaatccgtatgtgaagacctacctgttgcccgacagatcctcccagggaaagcgcaagactggagtccaaaggaacaccgtggacccgacctttcaggagaccttgaagtatcaggtggcccctgcccagctggtgacccggcagctgcaggtctcggtgtggcatctgggcacgctggcccggagagtgtttcttggagaagtgatcattcctctggccacgtgggactttgaagacagcacaacacagtccttccgctggcatccgctccgggccaaggcggagaaatacgaagacagcgttcctcagagtaatggagagctcacagtccgggctaagctggttctcccttcacggcccagaaaactccaagaggctcaagaagggacagatcagccatcacttcatggtcaactttgtttggtagtgctaggagccaagaatttacctgtgcggccagatggcaccttgaactcatttgttaagggctgtctcactctgccagaccaacaaaaactgagactgaagtcgccagtcctgaggaagcaggcttgcccccagtggaaacactcatttgtcttcagtggcgtaaccccagctcagctgaggcagtcaagcttggagttaactgtctgggatcaggccctctttggaatgaacgaccgcttgcttggaggaaccagacttggttcaaagggagacacagctgttggcggggatgcatgctcactatcgaagctccagtggcagaaagtcctttccagccccaatctatggacagacatgactcttgtcctgcactgacatgaaggcctcaaggttccaggttgcagcaggcgtgaggcactgtgcgtctgcagaggggctacgaaccaggtgcagggtcccagctggagacccctttgaccttgagcagtctccatctgcggccctgtcccatggcttaaccgcctattggtatctgtgtatatttacgttaaacacaattatgttacctaagcctctggtgggttatctcctctttgagatgtagaaaatggccagattttaataaacgttgttacccatgaaaaaaaaaa

SEQ ID NO: 2628 - DNA, 822 bp, Homo sapiens
atgatgatatccttgagagttttactggtgatcctgtggcttcagttaagctgggtttggagccaacggaaggaggtggagcaggatcctggacccttcaatgttccagagggagccactgtcgctttcaactgtacttacagcaacagtgcttctcagtctttcttctggtacagacaggattgcaggaaagaacctaagttgctgatgtccgtatactccagtggtaatgaagatggaaggtttacagcacagctcaatagagccagccagtatatttccctgctcatcagagactccaagctcagtgattcagccacctacctctgtgtgcctacaaattcaggaaacacacctcttgtctttggaaagggcacaagactttctgtgattgcaaatatccagaaccctgaccctgccgtgtaccagctgagagactctaaatccagtgacaagtctgtctgcctattcaccgattttgattctcaaacaaatgtgtcacaaagtaaggattctgatgtgtatatcacagacaaaactgtgctagacatgaggtctatggacttcaagagcaacagtgctgtggcctggagcaacaaatctgactttgcatgtgcaaacgccttcaacaacagcattattccagaagacaccttcttccccagcccagaaagttcctgtgatgtcaagctggtcgagaaaagctttgaaacagatacgaacctaaactttcaaaacctgtcagtgattgggttccgaatcctcctcctgaaagtggccgggtttaatctgctcatgacgctgcggctgtggtccagctga

SEQ ID NO: 2629 - DNA, 3125 bp, Homo sapiens
ggcgcggcgggagcgcgcttggcgcgtgcgtacgcgacggcggttggcggcgcgcgggcagcgtgaagcgaggcgaggcaaggcttttcggacccacggagcgacagagcgagcggcccctacggccgtcggcggcccggcggcccgagatgttatctgggaagaaggcggcagccgcggcggcggcggctgcagcggcagcaaccgggacggaggctggccctgggacagcaggcggctccgagaacgggtctgaggtggccgcgcagcccgcgggcctgtcgggcccagccgaggtcgggccgggggcggtgggggagcgcacaccccgcaagaaagagcctccgcgggcctcgccccccgggggcctggcggaaccgccggggtccgcagggcctcaggccggccctactgtcgtgcctgggtctgcgacccccatggaaactggaatagcagagactccggaggggcgtcggaccagccggcgcaagcgggcgaaggtagagtacagagagatggatgaaagcttggccaacctctcagaagatgagtattattcagaagaagagagaaatgccaaagcagagaaggaaaagaagcttcccccaccaccccctcaagccccacctgaggaagaaaatgaaagtgagcctgaagaaccatcggggcaagcaggaggacttcaagacgacagttctggagggtatggagacggccaagcatcaggtgtggagggcgcagctttccagagccgacttcctcatgaccggatgacttctcaagaagcagcctgttttccagatattatcagtggaccacaacagacccagaaggtttttcttttcattagaaaccgcacactgcagttgtggttggataatccaaagattcagctgacatttgaggctactctccaacaattagaagcaccttataacagtgatactgtgcttgtccaccgagttcacagttatttagagcgtcatggtcttatcaacttcggcatctataagaggataaaacccctaccaactaaaaagacaggaaaggtaattattataggctctggggtctcaggcttggcagcagctcgacagttacaaagttttggaatggatgtcacacttttggaagccagggatcgtgtgggtggacgagttgccacatttcgcaaaggaaactatgtagctgatcttggagccatggtggtaacaggtcttggagggaatcctatggctgtggtcagcaaacaagtaaatatggaactggccaagatcaagcaaaaatgcccactttatgaagccaacggacaagctgacactgtcaaggttcctaaagagaaagatgaaatggtagagcaagagtttaaccggttgctagaagctacatcttaccttagtcatcaactagacttcaatgtcctcaataataagcctgtgtcccttggccaggcattggaagttgtcattcagttacaagagaagcatgtcaaagatgagcagattgaacattggaagaagatagtgaaaactcaggaagaattgaaagaacttcttaataagatggtaaatttgaaagagaaaattaaagaactccatcagcaatacaaagaagcatctgaagtaaagccacccagagatattactgccgagttcttagtgaaaagcaaacacagggatctgaccgccctatgcaaggaatatgatgaattagctgaaacacaaggaaagctagaagaaaaacttcaggagttggaagcgaatcccccaagtgatgtatatctctcatcaagagacagacaaatacttgattggcattttgcaaatcttgaatttgctaatgccacacctctctcaactctctcccttaagcactgggatcaggatgatgactttgagttcactggcagccacctgacagtaaggaatggctactcgtgtgtgcctgtggctttagcagaaggcctagacattaaactgaatacagcagtgcgacaggttcgctacacggcttcaggatgtgaagtgatagctgtgaatacccgctccacgagtcaaacctttatttataaatgcgacgcagttctctgtacccttcccctgggtgtgctgaagcagcagccaccagccgttcagtttgtgccacctctccctgagtggaaaacatctgcagtccaaaggatgggatttggcaaccttaacaaggtggtgttgtgttttgatcgggtgttctgggatccaagtgtcaatttgttcgggcatgttggcagtacgactgccagcaggggtgagctcttcctcttctggaacctctataaagctccaatactgttggcactagtggcaggagaagctgctggtatcatggaaaacataagtgacgatgtgattgttggccgatgcctggccattctcaaagggatttttggtagcagtgcagtacctcagcccaaagaaactgtggtgtctcgttggcgtgctgatccctgggctcggggctcttattcctatgttgctgcaggatcatctggaaatgactatgatttaatggctcagccaatcactcctggcccctcgattccaggtgccccacagccgattccacgactcttctttgcgggagaacatacgatccgtaactacccagccacagtgcatggtgctctgctgagtgggctgcgagaagcgggaagaattgcagaccagtttttgggggccatgtatacgctgcctcgccaggccacaccaggtgttcctgcacagcagtccccaagcatgtgagacagatgcattctaagggaagaggcccatgtgcctgtttctgccatgtaaggaaggctcttctagcaatactagatcccactgagaaaatccaccctggcatctgggctcctgatcagctgatggagctcctgatttgacaaaggagcttgcctcctttgaatgacctagagcacagggaggaacttgtccattagtttggaattgtgttcttcgtaaagactgaggcaagcaagtgctgtgaaataacatcatcttagtcccttggtgtgtggggtttttgttttttttttatattttgagaataaaacttcatataaaattggcaaaaaaaaaaaaaaaaaa

SEQ ID NO: 2630 - DNA, 4762 bp, Homo sapiens
ggcgggcgctcggcgactcgtccccggggccccgcgcgggcccgggcagcaggggcgtgatgtcacggcagggagggggcgcgggagccgccgggccggcggggaggcgggggaggtgttttccagctttaaaaaggcaggaggcagagcgcggccctgcgtcagagcgagactcagaggctccgaactcgccggcggagtcgccgcgccagatcccagcagcagggcgcgggcaccggggcgcgggcagggctcggagccaccgcgcaggtcctagggccgcggccgggccccgccacgcgcgcacacgcccctcgatgactttcctccggggcgcgcggcgctgagcccggggcgagggctgtcttcccggagacccgaccccggcagcgcggggcggccgcttctcctgtgcctccgcccgccgctccactccccgccgccgccgcgcggatgccaagcaccagctttccagtcccttccaagtttccacttggccctgcggctgcggtcttcgggagaggagaaactttggggcccgcgccgcgcgccggcggcaccatgaagtcagcggaggaagaacactatggctatgcatcctccaacgtcagccccgccctgccgctccccacggcgcactccaccctgccggccccgtgccacaaccttcagacctccacaccgggcatcatcccgccggcggatcacccctcggggtacggagcagctttggacggtgggcccgcgggctacttcctctcctccggccacaccaggcctgatggggcccctgccctggagagtcctcgcatcgagataacctcgtgcttgggcctgtaccacaacaataaccagtttttccacgatgtggaggtggaagacgtcctccctagctccaaacggtccccctccacggccacgctgagtctgcccagcctggaggcctacagagacccctcgtgcctgagcccggccagcagcctgtcctcccggagctgcaactcagaggcctcctcctacgagtccaactactcgtacccgtacgcgtccccccagacgtcgccatggcagtctccctgcgtgtctcccaagaccacggaccccgaggagggctttccccgcgggctgggggcctgcacactgctgggttccccgcggcactccccctccacctcgccccgcgccagcgtcactgaggagagctggctgggtgcccgctcctccagacccgcgtccccttgcaacaagaggaagtacagcctcaacggccggcagccgccctactcaccccaccactcgcccacgccgtccccgcacggctccccgcgggtcagcgtgaccgacgactcgtggttgggcaacaccacccagtacaccagctcggccatcgtggccgccatcaacgcgctgaccaccgacagcagcctggacctgggagatggcgtccctgtcaagtcccgcaagaccaccctggagcagccgccctcagtggcgctcaaggtggagcccgtcggggaggacctgggcagccccccgcccccggccgacttcgcgcccgaagactactcctctttccagcacatcaggaagggcggcttctgcgaccagtacctggcggtgccgcagcacccctaccagtgggcgaagcccaagcccctgtcccctacgtcctacatgagcccgaccctgcccgccctggactggcagctgccgtcccactcaggcccgtatgagcttcggattgaggtgcagcccaagtcccaccaccgagcccactacgagacggagggcagccggggggccgtgaaggcgtcggccggaggacaccccatcgtgcagctgcatggctacttggagaatgagccgctgatgctgcagcttttcattgggacggcggacgaccgcctgctgcgcccgcacgccttctaccaggtgcaccgcatcacagggaagaccgtgtccaccaccagccacgaggccatcctctccaacaccaaagtcctggagatcccactcctgccggagaacagcatgcgagccgtcattgactgtgccggaatcctgaaactcagaaactccgacattgaacttcggaaaggagagacggacatcgggaggaagaacacacgggtacggctggtgttccgcgttcacgtcccgcaacccagcggccgcacgctgtccctgcaggtggcctccaaccccatcgaatgctcccagcgctcagctcaggagctgcctctggtggagaagcagagcacggacagctatccggtcgtgggcgggaagaagatggtcctgtctggccacaacttcctgcaggactccaaggtcattttcgtggagaaagccccagatggccaccatgtctgggagatggaagcgaaaactgaccgggacctgtgcaagccgaattctctggtggttgagatcccgccatttcggaatcagaggataaccagccccgttcacgtcagtttctacgtctgcaacgggaagagaaagcgaagccagtaccagcgtttcacctaccttcccgccaacgttccaattataaaaacagaacccactgatgattatgagcctgctccaacctgtggaccggtgagccaggggttaagtcctctcccaagaccatactacagccagcagctcgcgatgccacccgaccccagctcctgcctcgtggccggcttcccgccctgtccgcagagaagcaccctgatgccagcggcccctggcgtgagccccaagctccacgacctttctcccgctgcctacaccaagggcgttgccagcccgggccactgtcacctcggactcccgcagccggccggagaggcccccgccgtccaggacgtgcccaggccagtggccacgcaccccggctcgcccgggcagccacccccggccctgctgccacagcagtaaatgaaataatacgaaatgacctctccagcacgagcacccactcctagttgccacattggagcactcagttcagcaggggtatgctgacttcagcagacaaagacttttgaataaataaactgaactcacacctggtaccactcagaacctccaactgactgaatgccaggagctgaacattaatatgtgcaaagattggctctccaacaagaaggaaagcagggaggaagggagaccactgtgtcacctggaggagaagtcatctcatgacaacagaagggaggtggccgggctgagcacgggagacccaccgtgcaggggcctttcatgggaacggcccacacgcagtttgaccccacgcccagcccttctggcacccctggggttcaatactggaagtgccttatttaaccagaccatcagggcatcatagaattgagcattgaatttgctactgtaggagtatttttaggagcagaaactgcaaacacatttcattgtgaggttttaccctctgtatgaatgaagagaacgctggaaggctgcgagaggactctagtatgagtctccaacatttggaacgtttcctgggctgtcacgtacactcctgctgccttacacagtgcattttagaatcttccagtctgtcatctcagctcttttgtaacatgcttcccttgtctgcgcggttgaaaccgtaggcttgttcatagtcgcatgctcgcatctttgtttttaatctggcttcgaacatagcacaagtaacttgaatagcacatcaataggttactggacaaaagcagaaaaacctgttacaggatagcctgcatttgcatgtgtgtacatatctaggcatctatttatgtataaataataacagagccgacgtgtcctcgcccaggagggcttccctgtcagcaataaccggcatccgttttggaacctgcgtctggggctccagtcgctgctcttgctggcgtccatcgccgcctcggacggccgtgcattttctcgtctcacgcagttcgaggaggaccctagaaagccaggagctgtgattgacagtagctgtaggttaccagacggcaacattagaaagtgattgtaaataacatgcaacctaagtgtaatatatttgttcagttataagatgattgtttcacagaagccttaccactctctgcttcatctaagaaaaccaataccaaaaacgccactttaatgctcagccctgcgttgtgtgttttcagatgagttactgttaacaggtaggtttgtgtaggccttgctgggcactctgtacaattagttgcttattacgtatgattactcacagcgatctattgttccatataaccaaaaagcatggtttattcattgaaacacggttgacctgaactcgtgccttaggaattaatgcccccttatggaacctgcctgaattgcacctgcgggtggaggctccggctgtgaagtcactgaacagaacgtcgctgatggagaaagggctcccgcagaaggaacggcctgtaccgtgcgctccggcacaatcgcgtctcttgtgtctcactcacggaaagaaacaacctgaaggccatcccgtcggtctgcacgtaaccgtgaagacgtgtggccgcgtcccacctgcggctgggtaccctgcacccggcactgtaggagtcacgtgcagcctttctcaggggactgtcattgaaaaggaaacgtttgatgtctgtgtcagctgtctttgtagttaggaaatagatccaataaagccgtatttttttgctggaaaaaaaaaaaaaaaaaaaaaaaaaaaaaaaaaaaaaaa

SEQ ID NO: 2631 - DNA, 2901 bp, Homo sapiens
ggaatgacgtaagaaagataggcatgagcatgtggtaactaggttagcacgtgtgcttcccagcccaggagcgaccaaatactgtggtggcgtcaggtgtgcagtggagaggaatatagaggctgtatggcctccctcagtgagggcagggcaagagggatcactctgagagaacaaaaataggccccaagttgctaagcagtgattgggaaccttcctttccttggcggagatgcatgacattccctaccgatccccagacacagcctgtgggactcttaggagaaatggtgatttactgaataactgacccgttgccgagatgagtacaatgaagtggaggtgatgaactcaaatcgtcttccagggccaggcggctgaccggggtgagcgtagtggcccgctggggaccatggccgccctgacagccacacccacctggagctgacttggttctggctgttgctgccactgtgaaatctgtatctctctccatctctgctctactatccccggccttgccagacagtgttctttttcggaagaagtctagatttttgcatgaaaaaaactcaatctttaaaggtcgactcagaacattttaaggaggcctccacttggtctgatgcagtcttgctaattaagaactaaaggccttctgaccttcttggtgctcatgctgtacggcatctgaatgtctcgaccgagtctgagccgtgcagctgtcctccacctgcgaaagtaatgagaatcctatcacgggacataaggataggtctaaacagggtccatgccaagaaaacagtggggtgctctcccaggcctctcccctgtccactaaccctggccttgccggctgccttccaggctctgggggaagagctcctgcattcttccctggccaccttggctccagggctccccagagagcctcttccctccccaagtacctgagaaagatgagagaggcacgtgctctgctgggaaggtccagtgagcggttcaagggcctggaatctccctacggccaagtctaagggttctgggattctgggctttgtgggctttgcttgcttgctgggaatgggctttccctgtcccgccctgccccacctcgcctctgtctctcagaagctccagaacccagcagtgacctgcaaaatgtggcctctgatgggggcttagggtgggagatggggagagcctacattgtcttttgctccttgaaaactttaatagctcctattttccagagaatggtgctttgtgagcaacatgcgagtaagagagaaataggaggaagggggagtaggggcggatgggagaagagtggctcgtttttacctctcactgcattgacattttgtgaacgtgaagcttaaactttctgggcttacaagacccaggggcacgtcagctccttagatgggctcagcctgacacataattcttaagcctttcctgtttaagaaacttctagaggctgtgtactctcaccaatcctcttcgagaatttgttcatgtgtatttccccattatatggatgaggctcaggataacagcatagtggctaccttctactgagttttgaggtgctaataagtatgtttgtctgaggctgcacatgtgggtggctctgtgtgtatgatccaagggacaaaatgacgatgtaggaaccagcaagaacggaatctgggctgatgcttcagtctccacctgggtgatggctagcctcccgccctccaccaccgcatcccacacgtgctgcgcactgtccccgtgtctcctggagaaccaaactggagaaaacctttctgagtatctctcatagtaccccttccttaagaagatgtggtttagagcatgtgtgcaatcctgcctctgtaattaggaaacggagcccgaggctttccattgttggttgaacccaggacagctggtgctattcacaggctgaagaactgggcagttcttacttgggtctgtcctaggatgtggaggaagttcaggactaacgctaggcagagagtatgactcggtttacccagcctaggggcctctggatgggaacactccattccaagatctcagcagagcagggcttcctggcttgaggctggaagcctttgggaagaggcccagctgggacattccctgggcacctgtcttccgctgaagggagcaaggtgccctctgggactgacagccatgaccctctgtgccatcctcaatccttgagccatatatcaagagtcctctagagccggatggtcctcaaaagtctgtccaaggaatgccaacgttcaccgggctctgagaaacgacgcaaatctctgagctggggaccacttggagaaccggcttagtaacagtcctgatcttcgcaagccagcttcttctgcatctgaggggctcctggcgcccagaggaggcagacagatgtcttctagctgagtttctaaccgcatgatgagactcagaccttccgctgcactagaaaatctgcaacagtgtccctgagtcacttctccttagtgggcagactcgtgttagatttgtggaacccagctctctgatttactccttttggaaaacccatggaatttcatgtataaggctttcatttgtattttaaggtttttctgtttgttttgagtatatacatggtgctcaatagcaacatcttagcagatgaagcagtttatgattccactccctcctgtatgacaggtagccactatactgaatcaaggtgctgaactcaaatcacaaaattctggcttaccgatacaacaaccaatacatctttgttctgtaataaaaaatttgactccttacttttataacttattaaagttaaaatgtctgtgtttttgcaaatcaaaaaaaaaaaaaaaaaaa

SEQ ID NO: 2632 - DNA, 2197 bp, Homo sapiens
aaattaacgtactatcctccttacttttgggtcgggccctccgggaagatggcggccgtgcaggcggccgaggtgaaagtggatggcagcgagccgaaactgagcaagaagtggtggtaatcattagttccagggtgctctgccatgttgacgcaagctgctgtaaggcttgttagggggtccctgcgcaaaacctcctgggcagagtggggtcacagggaactgcgactgggtcaacttgctcctttcacagcgcctcacaaggacaagtcattttctgatcaaagaagtgagctgaagagacgcctgaaagctgagaagaaagtagcagagaaggaggccaaacagaaagagctcagtgagaaacagctaagccaagccactgctgctgccaccaaccacaccactgataatggtgtgggtcctgaggaagagagcgtggacccaaatcaatactacaaaatccgcagtcaagcaattcatcagctgaaggtcaatggggaagacccatacccacacaagttccatgtagacatctcactcactgacttcatccaaaaatatagtcacctgcagcctggggatcacctgactgacatcaccttaaaggtggcaggtaggatccatgccaaaagagcttctgggggaaagctcatcttctatgatcttcgaggagagggggtgaagttgcaagtcatggccaattccagaaattataaatcagaagaagaatttattcatattaataacaaactgcgtcggggagacataattggagttcaggggaatcctggtaaaaccaagaagggtgagctgagcatcattccgtatgagatcacactgctgtctccctgtttgcatatgttacctcatcttcactttggcctcaaagacaaggaaacaaggtatcgccagagatacttggacttgatcctgaatgactttgtgaggcagaaatttatcatccgctctaagatcatcacatatataagaagtttcttagatgagctgggattcctagagattgaaactcccatgatgaacatcatcccagggggagccgtggccaagcctttcatcacttatcacaacgagctggacatgaacttatatatgagaattgctccagaactctatcataagatgcttgtggttggtggcatcgaccgggtttatgaaattggacgccagttccggaatgaggggattgatttgacgcacaatcctgagttcaccacctgtgagttctacatggcctatgcagactatcacgatctcatggaaatcacggagaagatggtttcagggatggtgaagcatattacaggcagttacaaggtcacctaccacccagatggcccagagggccaagcctacgatgttgacttcaccccacccttccggcgaatcaacatggtagaagagcttgagaaagccctggggatgaagctgccagaaacgaacctctttgaaactgaagaaactcgcaaaattcttgatgatatctgtgtggcaaaagctgttgaatgccctccacctcggaccacagccaggctccttgacaagcttgttggggagttcctggaagtgacttgcatcaatcctacattcatctgtgatcacccacagataatgagccctttggctaaatggcaccgctctaaagagggtctgactgagcgctttgagctgtttgtcatgaagaaagagatatgcaatgcgtatactgagctgaatgatcccatgcggcagcggcagctttttgaagaacaggccaaggccaaggctgcaggtgatgatgaggccatgttcatagatgaaaacttctgtactgccctggaatatgggctgccccccacagctggctggggcatgggcattgatcgagtcgccatgtttctcacggactccaacaacatcaaggaagtacttctgtttcctgccatgaaacccgaagacaagaaggagaatgtagcaaccactgatacactggaaagcacaacagttggcacttctgtctagaaaataataattgcaagttgtataactcaggcgtctttgcatttctgcgaaagatcaaggtctgcaagggaattcttgtgtgctgctttccatttgacaccgcagttctgttcagccatcagaagagagacaaggaattaaaaatttctttttaatcctgttaccaaataaaaaa

SEQ ID NO: 2633 - DNA, 2048 bp, Homo sapiens
gtgttgacagcggcggcggtggaaccgggcgggcggcgggagtcggcgcctcgggttcctacctcgcgtccctaggcggcggcggccgggcgtcccgggatggccttcatggagaagccgccagccggcaaggtgctgctggacgacacggtgccgctgacagcagccatcgaggcgagccagagcctgcagtcccacacggaatatattattcgagtgcaaagaggaatttctgtggaaaacagctggcagattgttagaagatacagtgactttgatttgcttaacaacagcttacagattgcaggcctaagtctacctcttcctcccaaaaaattgattggtaacatggatcgtgaattcatagctgaaaggcagaaaggtcttcagaactatctcaacgtgatcacaacaaatcatatcttgtctaattgtgagctggttaagaagtttttagatccaaacaactattccgcaaactatactgagattgccttgcaacaggtttccatgttcttccgatcagaaccaaagtgggaggtggtggaacctttgaaagacataggttggagaataaggaagaaatatttcttgatgaagattaaaaatcagccaaaggaacggctagtgttaagctgggctgaccttggcccagacaagtatttgtcagataaagattttcagtgtctaatcaaacttctgccttcttgtttgcacccttacatctatcgggttacctttgccacagctaatgaatcctcagcgttgctaattaggatgtttaacgaaaagggaacattgaaggatctgatctacaaggcaaaaccaaaagacccatttctaaagaagtactgcaaccctaagaagattcagggcctggaactccagcaaataaaaacatatggacggcaaatattagaggtactgaagtttcttcatgacaagggattcccttatgggcatcttcacgcctccaatgtgatgctcgatggggacacttgccggctgctggaccttgagaattccttattgggcctgccttccttctaccgatcttatttttcacaattcaggaaaatcaatacattggaaagtgtggatgtccactgctttggccacttactgtatgaaatgacttatggacgaccgccagactcggtgcctgtggactccttccctcctgccccgtccatggctgtggtggccgtgttggagtctacgctgtcttgtgaagcctgtaaaaatggcatgcctaccatctcccggctcttacagatgccattattcagcgatgttttactaaccacttctgaaaaaccacagtttaagatccctacaaagttaaaagaggcattgagaattgccaaagaatgtatagagaagagactaattgaggaacagaaacagattcaccagcatcgaagactgacaagagctcagtcccaccatggatctgaggaggaaagaaaaaaaagaaagattttagctcgaaagaagtcaaaacgatctgctcttgaaaatagtgaagagcattcagcgaagtacagcaactccaataattcagcaggatctggggccagctcacctctcacgtccccgtcatcgccaactccaccctctacatcagggatatctgcattacctccacctcctccacctccaccaccaccagcagctcccttgcctcctgcgagcaccgaggcacctgcccagctctcgtctcaggctgtgaatggcatgagccgaggggccttgctcagctccatccagaatttccaaaaaggaactttgaggaaagccaaaacctgtgatcacagtgctccgaagatcggctgaagcttcctgtttacacttggagggaaaagttcttttttattcctactcacccctaccccccaaactaccctcttcctgggaaagtaattgctgagccagtacagccacaaacagtactattttgcagatgctcatgtaagcagcttttcgagagaaataattctttaagcagaataaagttaggctggcatgcaaaaaaaaaaaaaaaaaaa

SEQ ID NO: 2634 - DNA, 7907 bp, Homo sapiens; identical to SEQ ID NO: 2610

SEQ ID NO: 2635 - DNA, 1771 bp, Homo sapiens; identical to SEQ ID NO: 1674

SEQ ID NO: 2636 - DNA, 7500 bp, Homo sapiens
agctcatgggagtatgaaggagatggtaggaggctgctgcgtatgttcggacgagaggggctgggccgagaacccgctggtctactgcgatgggcacgcgtgcagcgtggccgtccaccaagcttgctatggcatcgttcaggtgccaacgggaccctggttctgccggaaatgtgaatctcaggagcgagcagccagggtgaggtgtgagctgtgcccacacaaagacggggcattgaagaggactgataatggaggctgggcacacgtggtgtgtgccctctacatccccgaggtgcaatttgccaacgtgctcaccatggagcccatcgtgctgcagtacgtgcctcatgatcgcttcaacaagacctgttacatctgcgaggagcagggccgggagagcaaggcggcctcgggagcctgcatgacctgtaaccgccatggatgtcgacaagctttccacgtcacctgtgcccaaatggcaggcttgctgtgtgaggaagaagtgctggaggtggacaacgtcaagtactgcggctactgcaaataccacttcagcaagatgaagacatcccggcacagcagcgggggaggcggaggaggcgctggaggaggaggtggcagcatggggggaggtggcagtggtttcatctctgggaggagaagccggtcagcctcaccatccacgcagcaggagaagcaccccacccaccacgagaggggccagaagaagagtcgaaaggacaaagaacgccttaagcagaagcacaagaagcggcctgagtcgccccccagcatcctcaccccgcccgtggtccccactgctgacaaggtctcctcctcggcttcctcttcctcccaccacgaggccagcacgcaggagacctctgagagcagcagggagtcaaaggggaaaaagtcttccagccatagcctgagtcataaagggaagaaactgagcagtgggaaaggtgtgagcagttttacctccgcctcctcttcttcctcctcctcttcctcctcctctggggggcccttccagcctgcagtctcgtccctgcagagctcccctgacttctctgcattccccaagctggagcagccagaggaggacaagtactccaagcccacagcccccgccccttcagcccctccttctccctcagctcccgagccccccaaggctgacctttttgagcagaaggtggtcttctctggctttgggcccatcatgcgcttctccaccaccacctccagctcaggccgggcccgggcgccctcccctggggactataagtctccccacgtcacggggtctggggcctcggcaggcacccacaaacggatgcccgcactgagtgccacccctgtgcctgctgatgagacccctgagacaggcctgaaggagaagaagcacaaagccagcaagaggagccgccatgggccaggccgtcccaagggcagccggaacaaggagggcactgggggcccagctgccccatccttgcccagtgcccagctggctggctttaccgccactgctgcctcacccttctctggaggttccctggtcagctccggcctgggaggtctgtcctcccgaacctttgggccttctgggagcttgcccagcttgagcctggagtcccccttactaggggcaggcatctacaccagtaataaggaccccatctcccacagtggcgggatgctgcgggctgtctgcagcacccctctctcctccagcctcctggggcccccagggacctcggccctgccccgcctcagccgctccccgttcaccagcaccctcccctcctcttctgcttctatctccaccactcaggtgttttctctggctggctctacctttagcctcccttctacccacatctttggaacccccatgggtgccgttaatcccctcctctcccaagctgagagcagccacacagagccagacctggaggactgcagcttccggtgtcgggggacctcccctcaggagagtctgtcttccatgtcccccatcagcagcctccccgcactcttcgaccagacagcctctgcaccctgtgggggcggccagttagacccggcggccccagggacgactaacatggagcagcttctggagaagcagggcgacggggaggccggcgtcaacatcgtggagatgctgaaggcgctgcacgcgctgcagaaggagaaccagcggctgcaagagcagatcctgagcctgacggccaaaaaggagcggctgcagattctcaacgtgcagctctctgtgcccttccctgccctgcctgctgccctgcctgccgccaacggccctgtccctgggccctatggcctgcctccccaagccggcagcagcgactccttgagcaccagcaagagccctccgggaaagagcagcctcggcctggacaactcgctgtccacttcttctgaggacccacactcaggctgcccgagccgcagcagctcgtcgctgtccttccacagcacgcccccaccgctgcccctcctccagcagagccctgccactctgcccctggccctgcctggggcccctgccccactcccgccccagccgcagaacgggttgggccgggcacccggggcagcggggctgggggccatgcccatggctgaggggctgttgggggggctggcaggcagtgggggcctgcccctcaatgggctccttggggggttgaatggggccgctgcccccaaccccgcaagcttgagccaggctggcggggcccccacgctgcagctgccaggctgtctcaacagccttacagagcagcagagacatctccttcagcagcaagagcagcagctccagcaactccagcagctcctggcctccccgcagctgaccccggaacaccagactgttgtctaccagatgatccagcagatccagcagaaacgggagctgcagcgcctgcagatggctgggggctcccagctgcccatggccagcctgctggcaggaagctccaccccgctgctgtctgcgggtacccctggcctgctgcccacagcgtctgctccacccctgctgcccgctggagccctagtggctccctcgcttggcaacaacacaagtctcatggccgcagcagctgcagctgcagcagtagcagcagcaggcggacctccagtcctcactgcccagaccaaccccttcctcagcctgtcgggagcagagggcagtggcggtggccccaaaggagggaccgctgacaaaggagcctcagccaaccaggaaaaaggctaaatccacccttacccctcctgacccccccaagtggagggaacagatcctggcctgaggggtcctagcctggagcaggcgcctgcgcccagaccctggagagccttgacccagagcctgtgctgaggtccagggagtgtggagagctcctggtgtcgaggactgagactgagaggggagccccctccatctggcccccttccctttccgcactgtccgctttgtgaggctcagaggaaggacagtctgcaagcccgcctaggaggtccatccccagcaaatgttttggaggtccccccagagagcagagtgggccatggcagaagtagggggttggttggacctgtcacatgaaatggatcagcacttgaatggggagaagtggagggagaggccctgggcctgtccctgcggggaaatcttttatggaagaagggctggacccactttacctgcagtttcttcccagctcgggcagatggcagaagggaccccttggactttttctcgccatccctccccccagcgcaggggcacaagctgagcttgtaaaagcccacagatgttgggggctggagaaggggcaggagagcatcacactcagccccagcctcctcaacctcttggggccccgtgatggggaggagagggcaggtgcggggaggctctggccttccttggtgccccgccctttgtttgcactattggacttaggagtgccgagggtggggagatggagctgcccgtctcagtgtgtgagtgtgtgtgtgcgtgcatgtgtgtgtgtgtgtgtgtgtgtgtgtgtgtctgtctgcctgtctctctcctcctggacccagggcagccaagggcagggataggcgcagtggtcagatgaagcagcgccagagaggggacctcccagctcttatttgcaccctccccacctcaccaactttggtccctctctgggggcatgaatggttaacaaacaccagagcagtactccaatattggagagtcgctgggggcacagggctttgaatcagggtagtatcctgccttccctcccctgaccccacatggtctcagggcccccttagggccccctaccccactgatagcttcctccttctctggcacaaggggagccccagggcttgggggagggcgtaaggtggggggaaatgccactgcttttagcaaaagcctccctcccagaattagccagcttgcctcctgcaccccacccccaccaaccaggggagccactaagctgactaacaactgtcccctcacccaccagctatttccccagggtagagtgggcaattctcaccttcaaagagtccccgcctgcccaggcctttggcacagaggctgagtggacagtcaggagagaggcgagaggcaaggcgaagcctgtgtccctgtttcagttgcactggggttggagcccagggtaggggtttccagcttccccaggctccggccttgtcagtctctttgcatgtgtggatttttctgtgtgtgtttctgtttgggtttttgttgttgggttttttttttttttttaataaagaaaagaagatgtgtatatttttggcaacgacagaaacgtagtgcagatatatttttgcctgtgctgctcaactgttttttttttctgatactgaaaataatattaatattcctgttgataagactttgtaagatgttagggagctgataatggaggggggtgggaatccttcaaaggcaatttcttaggcacttgcaagggcttgggggagggggaggcagttgtgatgacctcagaaatactcactttttattaatgctaaatatgttagaaagaaatgatagcattcagcattttattcttcttaatctattaagctgtgtaactccctgccccaaaccactgaaaagaaaagtaaccttcaggccaggcgcggtggctcacgcctgtaatcccaacactttgggaggctgaggcgggcggatcacttaaggtcaggagttcaagaccagcctggccaacatggtgaaaccccgtctctatcaaaaattagccgggcatggtggcacgtgcctgtaatcccagctacttgggaggctgaggcacgagaattgcttgaacccaggaggctgaggctgcagtgagccaagattgtgccactgcactccagcctgtgtgagagagtgagactctgtctcaaaagagaaaaaaaaagaaaagtaaccttcagagattcttagaagagttgctcattcacacccacgcccttgcccaaggctggcccacttagagcgaaacttaacttttgtctggatgggaagagaagtaagtctaccccgaggttgccatgttgaagagtgagaggtccaagtgattctgtgcattgaaaccaagacaccccacccagaacacttcttccctccctcagcccaaaccaaaggctggggttctcatctccaagtggctgttctccaactttcccaagccgcttgcattccccagactggactactgtggcggttaggttagatttgaagacggggcccaggctgggtatgaacgggtgcagccctcttctcctcttcccccccacatctctcatgagagaggtagtggcatttccttctcagggagcttcaatgggaaaggtctcgaaagcttcaggaggagcagaataccaacgcagggggatggctgtaacgatctcaccgtctcctaacctcagtcccttttttgagagtgaatggtggagggtgggaagggacccagatttgtagatctctttgtctgggggaggggaaggatgtggtttgcagagcggaagcagagtttggaaacgcatgagagcagagcttcgtgtgttcccaccctcagtgaggaggtgtgagtgggtgagcatgtggagttgggtgttcccaccctcagtgaggaggtgtgagtgggggtgcatatagaggcagtgcctgctgtggggtcacaactggtgcatgccagcgccaaagggacctgtctttaggggtcatttcagccagctcctcccatcacagatgacagctccaagcctagaaggggctcagtgacagggccaggacaagccctcaggactgtggcctcctggcccttggttcccctgccccacaacatggtctccacatggctggctggctggctgtccctgtgtgtgtgtgacacacggtgtgagtgcagggctgtgcccggggtgggagggtgtctatgtggcactgactgtcttagctcagagctggtggatcctctccatggacaatgacactttaaggattgtcttggtttgtttttcctatttgtggggtattttccccctcaggctcctgggtctgctgctgcctcaaggtgtcctgaccttgaggctgatgaggggacccctgcctgtttcccccatactgagttctagggaggtgctcaccccagactcttaggaagggtctagagaaatgagaggagcccaagccaggggccagctccgagaaagggtaacctccacgcttctctctcccaaattggaaatgaagacaggttttcaaaggcacaggctccccctgccagcttctaggatcttccttggtgtgcaatgggccagttaggggtaggcagcttgcacccagttctcctttatctcaacttattttcctggggagaggtgcctagagggattgaggtaacttcaactgggaattccaaggaaggtgggcaagtagccttggctctctcccaccatgtccatcaggattgagagtgtgtctagctcccgaccactttgtcttgacctactgaaaagttgggaactgaggggtgccttcattcccctttgttcactttctccagctcaacttgggacttgggtggtgggactggagacctcacccctgctcccgtcccgccccctttctatcccaacctgtttccatgtagcagacccttcctagggagcagggaggggaagccacagattgcaaacccaggggctcctttttcattctttctaaaaccttgatatcctcagcccaaaggcgatgcccccctgccacctccaagcctggaattgtgcataacccggatcttgtatctttgtataacggatgttatttgtacgaagggcagttcgtaaacagcacttgttcttttaataaaagaatgttttgcaaaaaaaaaaaaaaaaatccgaaga

SEQ ID NO: 2637 - DNA, 2139 bp, Homo sapiens
cagattccagagagtcccaggcgggcgggagtgtgcgatactcggggagctggggcatgtttgcatcacgaaactcggctgggggagagcagaggcagctggggaggggctgcggaaggaggaggctcaggaaggcaagccgacgccccctgtgtgtgtttctgtcctgagcctgttacttttttgacccccgatccgtctcttcttcctcagcttgtcctccatcttcccctcctttacccttggttcccacatgcacagatgctacggacgcttttcctcccctgtccccactcagccgcagcatcccccgctggcccccaggcccctcatccatccgctgcccacgaacccccagccccgcaccctccccgtggctcaggtctcccctatcccggcctccctgcacttcactctgctcctcccctgcctgggccttaaaaccccgcctgcagccgagagcccgcagagtccccaggtggcactgtcagagtcgctcagtgggaacctgcgccagccggcaggagacgtggctgtcctcagcctggcagtgcgtctggagggcctgtgcgagctcagcccaggtgtgacagcggggtggtaagagcagcagcaccctcagggcatccgatgggcggaggcccctcgaggtgacacccaccactcagccgagcgggactacgagtctgctttgtgctccgcgaggaccagaaacacctgcaagaggcacggagaggaggcgcctttcaagaggcgcctttcatggaactgaggactggcctggcttggggacaccaacaagccttccccctcctgctggacacagagacacccacccagcacaccagacacaccctctgagtcacctaggccgcctggggctgagaagacctaaccgaggggccagatggcttcgaccggcttagaactgctgggcatgaccctggctgtgctgggctggctggggaccctggtgtcctgcgccctgcccctgtggaaggtgaccgccttcatcggcaacagcatcgtggtggcccaggtggtgtgggagggcctgtggatgtcctgcgtggtgcagagcacgggccagatgcagtgcaaggtgtacgactcactgctggctctgccgcaggacctgcaggccgcacgtgccctctgtgtcattgccctcctgctggccctgcttggcctcctggtggccatcacaggtgcccagtgtaccacgtgtgtggaggacgaaggtgccaaggcccgtatcgtgctcaccgcgggggtcatcctcctcctcgccggcatcctggtgctcatccctgtgtgctggacggcgcacgccatcatccaggacttctacaaccccctggtggctgaggccctcaagcgggagctgggggcctccctctacctgggctgggcggcggctgcactgcttatgctgggcggggggctcctctgctgcacgtgccccccgccccaggtcgagcggccccgcggacctcggctgggctactccatcccctcccgctcgggtgcatctggactggacaagagggactacgtgtgaggcggaggtttcccctgggagcccactgctccccactgccccgccctttcgaccttggcctgatgaccagatgccctgctccatcacaacctccttccccaggaaaacccactttccaaaagcccaagctacacctggctgcagggctgggtcagctggcctggctgagctcttctcagtggggtcccctttgatgttctcccccaagttgggcagcctagaggtgttgggaaccctggcctgcccccacctccccagtaattgtttccttccgttgcccaggacactggctggccttccttctcttctgagccctcccctgccccaggaaccctggcctcaccaaaacagcagcagctcgttggctccaaaaccagggagcagaccatgccctcccaaccctggagttgtcagggagggcctgcccatcacctccctctccccaacatccccaccctcgagttggaaataaagagcatttgtaactggaaaaaaaaaaaaaaaaaaaaaaaaaaaaaaaaaaaaaaaaaaaaaaaaaaaaaaaaaaaaaaaaaaaaaaaaaaaaaaaaaaaaaaaaa

SEQ ID NO: 2638 - DNA, 5345 bp, Homo sapiens; identical to SEQ ID NO: 2112

SEQ ID NO: 2639 - DNA, 807 bp, Homo sapiens
gcgctcgggctgccgctggctcttcgcacgcggccatggccgactccgagctgcagctggttgagcagcggatccgcagcttccccgacttccccaccccaggcgtggtattcagggacatctcgcccgtcctgaaggaccccgcctccttccgcgccgccatcggcctcctggcgcgacacctgaaggcgacccacgggggccgcatcgactacatcgcaggcctagactcccgaggcttcctctttggcccctccctggcccaggagcttggactgggctgcgtgctcatccgaaagcgggggaagctgccaggccccactctgtgggcctcctattccctggagtacgggaaggctgagctggagattcagaaagacgccctggagccaggacagagggtggtcgtcgtggatgatctgctggccactggtggaaccatgaacgctgcctgtgagctgctgggccgcctgcaggctgaggtcctggagtgcgtgagcctggtggagctgacctcgcttaagggcagggagaagctggcacctgtacccttcttctctctcctgcagtatgagtgaccacagggcctcccagcccaacatctccagctggatcccagggaaatatcagccttgggcaactgcagtgaccaggggcaccggctgcccacagggaacacattcctttgctggggttcagcgcctctcctggggctggaagtgccaaagcctggggcaaagctgtgtttcagccacactgaacccaattacacacagcgggagaacgcagtaaacagctttcccacaa

SEQ ID NO: 2640 - DNA, 3387 bp, Homo sapiens; identical to SEQ ID NO: 1205

SEQ ID NO: 2641 - DNA, 5780 bp, Homo sapiens
ctgggcggggccgggaagcggcagtggcggctacgcgcgcgggggtgcgcgcgggaacgaccgggaaacaccgcgagggccggggtgggccaggctgtggggacgacgggctgcgacgatggccgcagcggcgggcggcggcgggccggggacagcggtaggcgccacgggctcggggattgcggcggcagccgcaggcctagctgtttatcgacggaaggatgggggcccggccaccaagttttgggagagcccggagacggtgtcccagctggattcggtgcgggtctggctgggcaagcactacaagaagtatgttcatgcggatgctcctaccaataaaacactggctgggctggtggtgcagcttcttcagttccaggaagatgcctttgggaagcatgtcaccaacccggccttcaccaaactccctgcaaagtgtttcatggatttcaaagctggaggcgccttatgtcacattcttggggctgcttacaagtataaaaatgaacagggatggcggaggtttgacctacagaacccatctcgaatggatcgtaatgtggaaatgtttatgaacattgaaaaaacattggtgcagaacaattgtttgaccagacccaacatctacctcattccagacattgatctgaagttggctaacaaattgaaagatatcatcaaacgacatcagggaacatttacggatgagaagtcaaaagcttcccaccacatttacccatattcttcctcacaagacgatgaagaatggttgagaccggtgatgagaaaagagaagcaagtgttagtgcattggggcttttacccagacagctatgatacttgggtccatagtaatgatgttgatgctgaaattgaagatccaccaattccagaaaaaccatggaaggttcatgtgaaatggattttggacactgatattttcaatgaatggatgaatgaggaggattatgaggtggatgaaaataggaagcctgtgagttttcgtcagcggatttcaaccaagaatgaagagccagtcagaagtccagaaagaagagatagaaaagcatcagctaatgctcgaaagaggaaacattcgccttcgcctccccctccgacaccaacagaatcacggaagaagagtgggaagaaaggccaagctagcctttatgggaagcgcagaagtcagaaagaggaagatgagcaagaagatctaaccaaggatatggaagacccaacacctgtacccaatatagaagaagtagtacttcccaaaaatgtgaacctaaagaaagatagtgaaaatacacctgttaaaggaggaactgtagcggatctagatgagcaggatgaagaaacagtcacagcaggaggaaaggaagatgaagatcctgccaaaggtgatcagagtcgatcagttgaccttggggaagataatgtgacagagcagaccaatcacattattattcctagttatgcatcatggtttgattataactgtattcatgtgattgaacggcgtgctcttcctgagttcttcaatggaaaaaacaaatccaagactccagaaatatacttggcatatcgaaattttatgattgacacgtatcgtctaaacccccaagagtatttaactagcactgcttgtcggaggaacttgactggagatgtgtgtgctgtgatgagggtccatgcctttttagagcagtggggactcgttaattaccaagttgacccggaaagtagacccatggcaatgggacctcctcctactcctcattttaatgtattagctgataccccctctgggcttgtgcctctgcatcttcgatcacctcaggttcctgctgctcaacagatgctaaattttcctgagaaaaacaaggaaaaaccagttgatttgcagaactttggtctccgtactgacatttactccaagaaaacattagcaaagagtaaaggtgctagtgctggaagagaatggactgaacaggagacccttctactcctggaggccctggagatgtacaaggatgattggaacaaagtgtcggaacatgttggaagtcgtactcaggatgaatgcatcctccactttttgagacttcccattgaggacccataccttgagaattcagatgcttcccttgggcctttggcctaccagcctgtccccttcagtcagtcaggaaatccagttatgagtactgttgcttttttggcatctgtggtggaccctcgcgtggcatctgctgcagcaaaagcggctttggaggagttttctcgggtccgggaggaggtaccactggaattggttgaagctcatgtcaagaaagtacaagaagcagcacgagcctctgggaaagtggatcccacctacggtctggagagcagctgcattgcaggcacagggcccgatgagccagagaagcttgaaggagctgaagaggaaaaaatggaagccgaccctgatggtcagcagcctgaaaaggcagaaaataaagtggaaaatgaaacggatgaaggtgataaagcacaagatggagaaaatgaaaaaaatagtgaaaaggaacaggatagtgaagtgagtgaggataccaaatcagaagaaaaggagactgaagagaacaaagaactcactgatacatgtaaagaaagagaaagtgatactgggaagaagaaagtagaacatgaaatttccgaaggaaatgttgccacagccgcagcagctgctcttgcctcagcggctaccaaagccaagcacctggctgcagtggaagaaagaaagatcaagtccctggtagctctcttggttgagacacaaatgaagaaactagagatcaaacttcgacattttgaagagctggaaactatcatggacagagagaaagaagctctagaacaacagaggcagcagttgcttactgaacgccaaaacttccacatggaacagctgaagtatgctgaattacgagcacgacagcaaatggaacagcagcagcatggccagaaccctcaacaggcacaccagcactcaggaggacctggcctggccccacttggagcagcagggcaccctggcatgatgcctcatcaacagccccctccctaccctctgatgcaccaccagatgccaccacctcatccaccccagccaggtcagataccaggcccaggttccatgatgcccgggcagcacatgccaggccgcatgattcccactgttgcagccaacatccacccctctgggagtggccctacccctcctggcatgccaccaatgccaggaaacatcttaggaccccgggtacccctgacagcacctaacggcatgtatccccctccaccacagcagcagccaccgccaccaccacctgcagatggggtccctccgcctcctgctcctggcccgccagcctcagctgctccttagcctggaagatgcagggaacctccacgcccaccaccatgagctggagtggggatgacaagacttgtgttcctcaactttcttgggtttctttcaggatttttcttctcacagctccaagcacgtgtcccgtgcctccccactcctcttaccacccctctctctgacactttttgtgttgggtcctcagccaacactcaaggggaaacctgtagtgacagtgtgccctggtcatccttaaaataacctgcatctcccctgtcctggtgtgggagtaagctgacagtttctctgcaggtcctgtcaactttagcatgctatgtctttaccatttttgctctcttgcagttttttgctttgtcttatgcttctatggataatgctatataatcattatctttttatctttctgttattattgttttaaaggagagcatcctaagttaataggaaccaaaaaataatgatgggcagaagggggggaatagccacaggggacaaaccttaaggcattataagtgaccttatttctgcttttctgagctaagaatggtgctgatggtaaagtttgagacttttgccacacacaaatttgtgaaaattaaacgagatgtggaaggagaacctcagtgattttattccctagtgaggcctctgagggcctccacactgcctggcagaacataccactgaactagtatgtgctagaggagggcacaaacatccgctccttccctaggcctgctggctctggttttctatgcagatgattcattggattgggggtgagtgttttgtttttctgggggcagtgtgagctttgagggttggaatattgggaggcattccttagtttcctcaactagcctggaaagttaggagtctagggtaattacccccaatgagtctagcctactattcactgctttgtgtgcatttttttctccctctttaaaaaaccctttaaaagaaaaaaaaaagtagatagtgctaaatattttagctcatgaaacttggttaggatggctgggggtacaagtccccaaactacctcttgttacagtagccagggagtggaatttcgtcaaccggtacttttaaggttaggatgggacgggaaaagtgaagcaggatattagctccttataccttctcccttccatttctgagatctcacattccatctatcacagggttttcaaagagatgctgagggtaacaaggaactcacttggcagtcagagcatcatgctttgaggtttggggtgctcaggctgggagggtagaatgccattccagaggacaagccacaaaaatgccttaatttgagctcgtatttacccctgctgataagtgacttgagagttcccggttttttcctcttgtccttccctcccttctgtccttccatgtgtggggaaagggtgtttttggtagagcttggtttccaaagcgcctggctttctcacttcacattctcaagtggcagtttcattatttagaatgcaaggtggacatcttttggatatctttttctatatattttctaaagctttacatatgagagggtatagggaggtgtttataaaacacttgagaacttttttccttaatatcagaaagcaaaaaaataaaaccacaattgagatttgcctttcaaaccctcaggtttgcctctaaccaggtgtccctggtcaccatcagagtactggaatacgggaaccgaggagaccttggtccttttgtttttgttctggactcttgggagtggaaatgagaatgagtttattcctactggagcttagttccaatgcatttggctccagaaagaccccagtgccttttgacaatggccagggttttacctacttcctgccagtctttcccaaaggaaactcattccaaatacttcttttttcccctggagtccgagaaggaaaatggaattctggttcatactgtggtcccttgtaacctcaggtctttaatgtgatcactttcaaatttaaaagatccaggtggaaatatttttactatagtaataattctacaaaatacctgaattcttaacactgttatatttcagtataagtggtggctttttcttttcatgtctttgatctggttttattcctgtaattcagccacctgattttgtgaggggggggaataatatgtggtttttgtacaaacatgtttctcagtgtgttgttattttggaaaaaatgaggggagggagtttggcaagaatggagaaaatgaatgaagaaggcctaatctctctctttttcagtgaataaatggaacaccatttctggattctaaaaaaaaaaaaaaaaaaaaaaaa

SEQ ID NO: 2642 - DNA, 2567 bp, Homo sapiens; identical to SEQ ID NO: 2053

SEQ ID NO: 2643 - DNA, 951 bp, Homo sapiens
cggtgtccaaaacaaaatggccgccacgtccagtgcttgtctgaccggctaaaatggcgtctacgcaattacgtcaggcgtcagatccgcgcacgactagagggcgggaaagatttgagctacgcctgcgcagagttgagaagctgatgtctcctcgacttccaactggaaccttgaacccccacatttctggaccttgagcattcctcaagtaggaagatgtaatgcaccttgacctctttctaaataagacacttccccaaataaggggagttgagagtgaacagtcttcacgtctccacccacttccagatcccagaggagacagacatcggatggctgttacctcctcctaaaatgtctgcatttacccagataatcttccaatggaaatccatggttcaagtgccacctcttcaggaaagccatctgacttcaatcaggtcagccctgacaaaggtcagctagccccttgaggacatcagctttggcctcagggtcctaatggcagcagaaccactgacagagctagaggagtccattgagaccgtggtcaccaccttcttcacctttgcaaggcaggagggccggaaggatagcctcagcgtcaacgagttcaaagagctggttacccagcagttgccccatctgctcaaggatgtgggctctcttgatgagaagatgaagagcttggatgtgaatcaggactcggagctcaagttcaatgagtactggagattgattggggagctggccaaggaaatcaggaagaagaaagacctgaagatcaggaagaagtaaagccgcctggctgagatggggtgggcagggcagagctgatcagggccgagcagaaccgcactcttcccaaataaagcttcctccttgaaacacaaaaaaaaaaaaaaaaaaaaaaaaaaaaaaaaaaaaaaaaaaaaaaaaaaaaaaaaa

SEQ ID NO: 2644 - DNA, 4473 bp, Homo sapiens; identical to SEQ ID NO: 2407

SEQ ID NO: 2645 - DNA, 1566 bp, Homo sapiens
gggccgcccaatggggcgcaagcgacgcggtatttgaatcctggaacaaggctacagcgtcgaagatccccagcgctgcgggctcggagagcagtcctaacggcgcctcgtacgctagtgtcctcccttttcagtccgcgtccctccctgggccgggctggcactcttgccttccccgtccctcatggcgctgctccgacgcccgacggtgtccagtgatttggagaatattgacacaggagttaattctaaagttaagagtcatgtgactattaggcgaactgttttagaagaaattggaaatagagttacaaccagagcagcacaagtagctaagaaagctcagaacaccaaagttccagttcaacccaccaaaacaacaaatgtcaacaaacaactgaaacctactgcttctgtcaaaccagtacagatggaaaagttggctccaaagggtccttctcccacacctgaggatgtctccatgaaggaagagaatctctgccaagctttttctgatgccttgctctgcaaaatcgaggacattgataacgaagattgggagaaccctcagctctgcagtgactacgttaaggatatctatcagtatctcaggcagctggaggttttgcagtccataaacccacatttcttagatggaagagatataaatggacgcatgcgtgccatcctagtggattggctggtacaagtccactccaagtttaggcttctgcaggagactctgtacatgtgcgttggcattatggatcgatttttacaggttcagccagtttcccggaagaagcttcaattagttgggattactgctctgctcttggcttccaagtatgaggagatgttttctccaaatattgaagactttgtttacatcacagacaatgcttataccagttcccaaatccgagaaatggaaactctaattttgaaagaattgaaatttgagttgggtcgacccttgccactacacttcttaaggcgagcatcaaaagccggggaggttgatgttgaacagcacactttagccaagtatttgatggagctgactctcatcgactatgatatggtgcattatcatccttctaaggtagcagcagctgcttcctgcttgtctcagaaggttctaggacaaggaaaatggaacttaaagcagcagtattacacaggatacacagagaatgaagtattggaagtcatgcagcacatggccaagaatgtggtgaaagtaaatgaaaacttaactaaattcatcgccatcaagaataagtatgcaagcagcaaactcctgaagatcagcatgatccctcagctgaactcaaaagccgtcaaagaccttgcctccccactgataggaaggtcctaggctgccgtggcccctggggatgtgtgcttcattgtgccctttttcttattggtttagaactcttgattttgtacatagtcctctggtctatctcatgaaacctcttctcagaccagttttctaaacatatattgaggaaaaataaagcgattggtttttcttaaggtaaaaaaaaaaaaaaaaaa

SEQ ID NO: 2646 - DNA, 2356 bp, Homo sapiens
actctctcgcgagagggccgcagagccgcctttgacgggggcgtgtacctggagagcaacggtaaggacggagccgacggctccggcgtcgggtcggttccggcatcgacgtatcgtttggtcgccccagagaggagacaggtttcttcagcttgccgctgaggatgtggcatcggctgcgctcaccgccgccgcctctgtgaactgcgggagttgggacagcggccagggctagatgggtgggacgcgagtcctcgccgaaagcttgccctgtgcggggcgcacttggaggcgagctctgggccgtggcgagttttgcagcctaaggtcttggcaggcgcattgctgtgggctgccggagagcaggctggagttcgagaccgcccaccggagagcaggcgagagttcgaggcctaggtacagcgcatttcgctaggcatccccaagaatatccgcgtgatccttgtggccagagtttgttgagctaatatccccagcccaaacagtagagcacatcacatgtcggccacctgggagcgttgaacctggtagttactaggcgcccctggtggaaataaaactcattatgccctagttatgtcttagtgcctgggtgacgatgatgtagcggttaaagattaactgagcgcacttagaggttgtctttgtctacctaaggaaaatatcaatagattaaacccccaaccttaaagaatctccgtgaatttttctgaggaaacgtgcaatattgtcatacaaaaggccccaaatatgcaaacattgctttttgttaaaagtttgttttgttttgcagtgacatctgtttgagcagatgaatatgccattgggaaagtcaaggactgtcggagaggaggacatggcagaccttaactaaagtgagggggacagtagagcactaaaagttctaggaaaggagatgaactgcttattccatcagatgaaaatatagtcagaacagatgagtagtagaacttaaacatgcccggagttgccaggaatttgcaaaagccttgatataattcctgttgctgtagaaagactttctacagtcactaatatatcaagttatgttcactagaaaaaaagtttacttagtttatagaaatgggctgaaaaatcctaattacttatctgtgaggttattttcatgaaggttaatcatccagaaactattagagagcctcggaatatatttcttctaatctgctctacctatcccattcaaaggagggaatctgaagatttaaggacaaagagcagttgaaaactcagagctgtggttaatgggagaatttcaaggatggtgaaagaaactaacatcattgcatccctgttttttgtattctggactttttagtttagctcttggtaaactacatcagaaattctttatgctaactctaacacacattttggggtattgctaatttaatctttgaatactgtttttgctgtttcatgattatatgttatgtcctaccagctagattgccaactcttgactactgactggaagtttattgtttattcagcaaataatgaattaagtcagtgaagtgagagatttcgtgtgtaaggattgttaacttgaacatttcaccagttacacacagttcagccctacttaaattttaaaaatcattgttggcacttgacattgttatgaggagttttgtattttcaacttgtattttgagagtgtcctcatgtgactgaagtatgtgctactcttcttaattgaataaccccagaatctccagaattgataattggaggaaattctactgttggaaagaatggatggattatacagccctgttttttgaccgttcattttgtccttggagtcactaccacttggcctcaaagtgtgatcatgtaaccctttccttaatactttgctacacagctgagcagaaactgtaaatttggatcctttgtcagtacaacttaaaatggaacaatttcaatggcttagggtaagataagtatgtaaagatacttttgtaatagaagaaaaaacattggatattaaaatcacacagtagtacctgggtgtggtggctcatgcctataatcccaacgctttgggaggccaagacaggagcactgctggaggccaggaatttgagaccagcctggccaacatggtgaaacctcgtctctaccaaaaaatacaaaaatcagccaggtgtggtggcacatgcctgtaatcccggatactcgggaggctgaggtgggagaatcgcttgaaccagggaggtggaggttgcagtgagctgaaatcgcaaaactgcactccaacctgggcaacagagtgagacctcctgtctcc

SEQ ID NO: 2647 - DNA, 1671 bp, Homo sapiens
tccacccaagagcaacctggaactaagttattcggcaacgaactgttccactttgttgtgaggcaatagatgtggaaattccctgacgaggggctctgtcctcatacttcctgcggagcttattgtcgtaagaatatctgtcatcctgctaatgtgcattgaaaggagagcaacggggctgaggccgtgtcagcacgatggaccccaaacagaccaccctcctgtgtcttgtgctctgtctgggccagaggattcaggcacaggaaggggactttcccatgcctttcatatctgccaaatcgagtcctgtgattcccttggatggatctgtgaaaatccagtgccaggccattcgtgaagcttacctgacccagctgatgatcataaaaaactccacgtaccgagagataggcagaagactgaagttttggaatgagactgatcctgagttcgtcattgaccacatggacgcaaacaaggcagggcgctatcagtgccaatataggatagggcactacagattccggtacagtgacaccctggagctggtagtgacaggcttgtatggcaaacccttcctctctgcagatcggggtctggtgttgatgccaggagagaatatttccctcacgtgcagctcagcacacatcccatttgatagattttcactggccaaggagggagaactttctctgccacagcaccaaagtggggaacacccggccaacttctctttgggtcctgtggacctcaatgtctcagggatctacaggtgctacggttggtacaacaggagcccctacctgtggtccttccccagtaatgccttggagcttgtggtcacagactccatccaccaagattacacgacgcagaacttgatccgcatggccgtggcaggactggtcctcgtggctctcttggccatactggttgaaaattggcacagccatacggcactgaacaaggaagcctcggcagatgtggctgaaccgagctggagccaacagatgtgtcagccaggattgacctttgcacgaacaccaagtgtctgcaagtaaacacctggaggtgaaggcagagaggagccaggactgtggagtccgacaaagctacttgaaggacacaagagagaaaagctcactaagaagcttgaatctacttttttttttttttgagacagagtctggctctgtcacccaggctggagtgcagtggagcaatctcggctcattgaacctcttgggttcaagtgattcttgtgcctcagcctcccaagtagctggaattacaggcacataccactgcacccagctaatttttgtatttttagtagagatggggtttcactgtgttggccaggctggtctcgaactcctgacctcaggtgatccacccaccttggcctcccaaagtgctgagattataggcatgagccaccacgcctggccagatgcatgttcaaaccaatcaaatggtgttttcttatgcaggactgatcgatttgcacccacctttctgcacataagttatggttttccatcttatctgtcttctgattttttatatcctgtttaatttcttccttcattgttcttctctttttttatttattttatttatttttatttttatttttatttgagacagagtctcactctgttgcccagg

SEQ ID NO: 2648 - DNA, 1764 bp, Homo sapiens; identical to SEQ ID NO: 1227

SEQ ID NO: 2649 - DNA, 2276 bp, Homo sapiens; identical to SEQ ID NO: 2292

SEQ ID NO: 2650 - DNA, 1239 bp, Homo sapiens
gacataaaaaccgggtgccggcaggcgccagtcgcaggtgtgctgctgaggcgtgagaatggcgtcccgcggccggcgtccggagcatggcggacccccagagctgttttatgacgagacagaagcccggaaatacgttcgcaactcacggatgattgatatccagaccaggatggctgggcgagcattggagcttctttatctgccagagaataagccctgttacctgctggatattggctgtggcactgggctgagtggaagttatctgtcagatgaagggcactattgggtgggcctggatatcagccctgccatgctggatgaggctgtggaccgagagatagagggagacctgctgctgggggatatgggccagggcatcccattcaagccaggcacatttgatggttgcatcagcatttctgctgtgcagtggctctgtaatgctaacaagaagtctgaaaaccctgccaagcgcctgtactgcttttttgcttctcttttttctgttctcgtccggggatcccgagctgtcctgcagctgtaccctgagaactcagagcagttggagctgatcacaacccaggccacaaaggcaggcttctccggtggcatggtggtagactaccctaacagtgccaaagcaaagaaattctacctctgcttgttttctgggccttcgacctttataccagaggggctgagtgaaaatcaggatgaagttgaacccagggagtctgtgttcaccaatgagaggttcccattaaggatgtcgaggcggggaatggtgaggaagagtcgggcatgggtgctggagaagaaggagcggcacaggcgccagggcagggaagtcagacctgacacccagtacaccggccgcaagcgcaagccccgcttctaagtcaccacgcggttctggaaaggcacttgcctctgcacttttctatattgttcagctgacaaagtagtattttagaaaagttctaaagttataaaaatgttttctgcagtaaaaaaaaagttctctgggccgggcgtggtggctcacacctgtaatcccagcaccttgggaggctgaggtgggaggatcatttgaggccaggagtttgagacctgcctgggcaacataatgaaacttcctttccagggaggaaaaaaaaaaaaaaaaaaagctctgagagcatcttattttgtttaaaggcaagaaataaaatttccttttgtggaaaaaaaaaa

SEQ ID NO: 2651 - DNA, 2935 bp, Homo sapiens; identical to SEQ ID NO: 2412

SEQ ID NO: 2652 - DNA, 1093 bp, Homo sapiens
caaaaaattaactgggcgtggtggcacacgcctgtaatcccagctacatatgaggctgaggcaagagaataacttgaacccaggaggcggagggtgcagtgagctgagatcctgccgctgcactccagcctgggtgacagagcacactccgtctcaaaaaaggaaagctgatgagaaattgggcatcccggaattcacacccaaaccatcagctggagctctgagactgttggggtgggaattcttccaagatgagaagcaagccagggaggctcaggtcctgggatgggcagggctttgatcaaaagaacacaggaagtgatttgctacttgaaagaaaggcaacccctccccaaggaagccctctgaaaatgcttagtcaacagtcggcttggcagacaaggtctgggaggggccacccgtatcgcagaggatgatagaagagaaaaaaatgacacccacctctgtctggggatgctgaaatcttcctggaggagtggtgaatgccaggaagatcgctgaaggattcaatgaaacaatatttctgaagtcctttacaacagggtccccaacccccggggtcatggactgctatcgggccatggtctgtctgttagaaaccatgagccctatcgggtcacagagcaggagatgagtggcaggcaagcgagcccgagctccacctcctctcagattctcgggggcgccattagattatcacaggatcgcaaaccctgttgtgaactgcacacacgagggatccaggttgcatgctgcttatgacaatctaatgcccggccgggtgcggtggctcacacctgtaatcctagcactttgggaggccgaggcgggcagatcacgaagtcaagagatagaaacgatcctggccaacgtggtgagaccccgtctctcctaaaaatacaaaaatgagctgggtgtggtggcacgtgcctgtcatcctagctactcgggaggctgaggcaggagaatcgcttgaacccgggaggcggaggttgcagtgagccaagatcacaccattgcactacagcctcggcgacagagccagactccgtctcaaaaaaaaaaaaaaaaa

SEQ ID NO: 2653 - DNA, 2479 bp, Homo sapiens
ccttttctcggggcgcccgagaggccagctcagacctcccggctcgacaggcggcgcgggcggcggtaaaatgtcggttccaggaccttaccaggcggccactgggccttcctcagcaccatccgcacctccatcctatgaagagacagtggctgttaacagttattaccccacacctccagctcccatgcctgggccaactacggggcttgtgacggggcctgatgggaagggcatgaatcctccttcgtattatacccagccagcgcccatccccaataacaatccaattaccgtgcagacggtctacgtgcagcaccccatcacctttttggaccgccctatccaaatgtgttgtccttcctgcaacaagatgatcgtgagtcagctgtcctataacgccggtgctctgacctggctgtcctgcgggagcctgtgcctgctggggtgcatagcgggctgctgcttcatccccttctgcgtggatgccctgcaggacgtggaccattactgtcccaactgcagagctctcctgggcacctacaagcgtttgtaggactcagccagacgtggagggagccgggtgccgcaggaagtcctttccacctctcatccagcttcacgcctggtggaggttctgccctggtggtctcacctctccagggggcccaccttcatgtcttcttttggggggaatacgtcgcaaaactaacaaatctccaaaccccagaaattgctgcttggagtcgtgcataggacttgcaaagacattccccttgagtgtcagttccacggtttcctgcctccctgagaccctgagtcctgccatctaactgtgatcattgccctatccgaatatcttcctgtgatctgccatcagtggctcttttttcctgcttccatgggcctttctggtggcagtctcaaactgagaagccacagttgccttatttttgaggctgttctgcccagagctcggctgaaccagcctttagtgcctaccattatcttatccgtctcttcccgtccctgatgacaaagatcttgccttacagactttacaggcttggctttgagattctgtaactgcagacttcattagcacacagattcactttaatttcttaattttttttttaaatacaaggagggggctattaacacccagtacagacatatccacaaggtcgtaaatgcatgctagaaaaatagggctggatcttatcactgccctgtctccccttgtttctctgtgccagatcttcagtgcccctttccatacagggatttttttctcatagagtaattatatgaacagtttttatgacctccttttggtctgaaatacttttgaacagaatttcttttttttaaaaaaaaacagagatggggtcttactatgttgcccaggctggtgtcgaactcctgggctcaagcgatccttctgccttggcctcccgaagtgctgggattgcaggcataagctaccatgctgggcctgaacataatttcaagaggaggatttataaaaccattttctgtaatcaaatgattggtgtcattttcccatttgccaatgtagtctcacttaaaaaaaaaaaaaagaaaaagaaatggataatttcatctactgcctttacttggggttaatgtgattcttaaacaccttcatcatggaactctcagagtggggtccgttttggtttcctggtggtgggttttgaaagataagggaaagcacattttgagcatgtctgggtaccatggtgcggatgcttgggaaccagaactgtttcagaggaatctaaagtctgattttagttttcagagacacagcttgttgtaaaacatgagaagacatgatttctaggactcaagcagcaagccaggattctaggttggctgctgtgtcatctttgaagtcaagacaaagctgggctcgaccttcaagggtcctcgttttgataatacttcagaatagggaactcatgtgaatactactatgtagaaataaaacctagaccttgagcgaacatctgtatattggttgaaaacgatagtggtaaccattgatcccccttcatttgatgtttggaaaattccagtaattatcatttttgcaacgaatatggataccacatagtactttggtgttacctgcttttgaaaaataaagtctttggttcacccggtgaactatttatgagttcttttggtgtgaagaaagggctcatgttgcatttccagccattgctacaaagaacctttatttgttcagtaacggtagaaaatccttcccgattaaaaacttcagacttgctgaatatcctgcaatgtcaagatgaccgatgttgagttgggtggatttgctaacgagtcagatttgaacatgaggctattggaacccaataggcgtcattgatggcggcaagccatagctttcaagttttaataaaatgcacaaaagagaaaaaaaaaa

SEQ ID NO: 2654 - DNA, 937 bp, Homo sapiens; identical to SEQ ID NO: 2068

SEQ ID NO: 2655 - DNA, 3642 bp, Homo sapiens
gcttccggccgcggccctggcgcgtggtctgcgcgcgcccggccgtgcgtgcggatgcggggaggctgcgtgtgtgcgcagggagagaacgccggccaccttcccgcttccgagctgggtgcgcgccgagcacaggagggtgcaatacctgccttgcgtcgcccgtgccgctccagccaccgtcaaatccgggtagcgacccggggcgtttgcagcggtgccgaggaagaggacgggaacggtgttacgattgcctgcgtttaggaggtggctgcgttgtgggaaaagctatcaaggaagaaattgccaaaccatgtctttttttctgttttcagagtagttcacaacagatctgagtgttttaattaagcatggaatacagaaaacaacaaaaaacttaagctttaatttcatctggaattccacagagacaaggccactttatgtttcccaggctggactggaacccctgggctcaaatgatcctcctacctaagcctgcagagtagcgaggacttcagttttcttagctccctggacccggttgacctgttggctcttcccgctggctgctctatcacgtggtgctctccgactactcaccccgagtgtaaagtcttgctgctctgttgcccaggctggagtacagtggcaggatctcagctcactgcaatctccgtctctcaggtttaagcagttctcctgcctcagcctcccaagtaggtgggactacagaaccttcggctcgcgtgcttctgagctgctgtggatggcctcggctctctggactgtccttccgagtaggatgtcactgagatccctcaaatggagcctcctgctgctgtcactcctgagtttctttgtgatgtggtacctcagccttccccactacaatgtgatagaacgcgtgaactggatgtacttctatgagtatgagccgatttacagacaagactttcacttcacacttcgagagcattcaaactgctctcatcaaaatccatttctggtcattctggtgacctcccacccttcagatgtgaaagccaggcaggccattagagttacttggggtgaaaaaaagtcttggtggggatatgaggttcttacatttttcttattaggccaagaggctgaaaaggaagacaaaatgttggcattgtccttagaggatgaacaccttctttatggtgacataatccgacaagattttttagacacatataataacctgaccttgaaaaccattatggcattcaggtgggtaactgagttttgccccaatgccaagtacgtaatgaagacagacactgatgttttcatcaatactggcaatttagtgaagtatcttttaaacctaaaccactcagagaagtttttcacaggttatcctctaattgataattattcctatagaggattttaccaaaaaacccatatttcttaccaggagtatcctttcaaggtgttccctccatactgcagtgggttgggttatataatgtccagagatttggtgccaaggatctatgaaatgatgggtcacgtaaaacccatcaagtttgaagatgtttatgtcgggatctgtttgaatttattaaaagtgaacattcatattccagaagacacaaatcttttctttctatatagaatccatttggatgtctgtcaactgagacgtgtgattgcagcccatggcttttcttccaaggagatcatcactttttggcaggtcatgctaaggaacaccacatgccattattaacttcacattctacaaaaagcctagaaggacaggatactttgtggaaagtgttaaataaagtaggtactgtggaaaattcatggggaggtcagtgtgctggcttacactgaactgaaactcatgaaaaacccagactggagactggagggttacacttgtgatttattagtcaggcccttcaaagatgatatgtggaggaattaaatataaaggaattggaggtttttgctaaagaaattaataggaccaaacaatttggacatgtcattctgtagactagaatttcttaaaagggtgttactgagttataagctcactaggctgtaaaaacaaaacaatgtagagttttatttattgaacaatgtagtcacttgaaggttttgtgtatatcttatgtggattaccaatttaaaaatatatgtagttctgtgtcaaaaaacttcttcactgaagttatactgaacaaaattttacctgtttttggtcatttataaagtacttcaagatgttgcagtatttcacagttattattatttaaaattacttcaactttgtgtttttaaatgttttgacgatttcaatacaagataaaaaggatagtgaatcattctttacatgcaaacattttccagttacttaactgatcagtttattattgatacatcactccattaatgtaaagtcataggtcattattgcatatcagtaatctcttggactttgttaaatattttactgtggtaatatagagaagaattaaagcaagaaaatctgaagtattgtcttgtttttaaaaaatacagttcctagtgtttttagaagtcacttaatttgtctcatttttccacctggaaattaggaataatgtagaatgcaaggcagtaatttccttttggaaaggactctgaaggcagaaaagaagggagagaacctcatgggcagaatattataaaaagagtgtcatattccagcatttgaattggaaagagaagagtgaagatccaagttgcattattaatctgccctgtgttttttccttttaacaatcagtttgagctgctgctgttatgagtttctcatcaagatgaaagccctaatatgtaaagtcaaatccgatttaaattttgtgcttttatagaaagaaatttcttcatagacgtggtgatatatcatttgttggacctgctaatagtaggtcaaaggggagcactccttgccccctgttcctgggtttatgcagttttctttttagagtttatatagggcaagtggttctttttctctgaattacaggatggaaaaaggtcatatcctttgtcaggaaatataaacttgaaagtatgtagtcagctcttgtaatactcatatttatgattgtcctatatgaaaaacaacttcagttaaaactataatgtgtgattctgtataacaaggtgatgtctgtttcccagggctcagacctaatccagttataataaaatcaattaaatgaaatattctatagaatcgatctatgcccttgttaatctccatccatataggagtcacgttctttaagacagatggtggtagttatttttgtggcatggttagatttgactggttttgcagaagattacagttatgtactgcataatgacatatacaatagtggtcccataaaattataatggagcagaaaatctattgcctcatgatgttttagccgttttaatgtcatagcctagtgcattactcacgtgtctgtggagatgctggtgtaaacaaacctactacactgccagttgtataaaagtacagcacattcagttatgtacagtatgtaatactgataatgacaataaatgacaccggtttgtgtatttactttttataaa

SEQ ID NO: 2656 - DNA, 3616 bp, Homo sapiens
gtcggccgcgtggctggaagacatggccactccagtcggtgttgagcacggcgagcagtctcaggcctttagtgatgatggtaaggctgcctgggtgggaaaacggggtcttccttgacacgacactaacatacttggcttcccttcctcagagacgaagtggtgacgataatctcggtttctccctcatagggtggttaggagggttaaaagtactggatgagaaaatgctttccaaacgttgagaaaatgttactatgtgaagggagagagctcaagcccgtcctcggcgtcatagggccggcttctgcgggggagagcgcctaacaacctgggcagccccgtgcgcctccgccgcgcgtgtgctgagcgtcatgcccaggggtcttcggtgcccgcgcacgggcagactctgacgatggtggttcttaattcagcatcaggagtgttaacgtgtgaagacgtgattccgcttggagtgtcttgaggacggccccaatcggtagttcatatttagctttacagataggagtcaataggattgtaaacttctggaaagccgtagttttaacaacgagccttttttcctcccccagaggcctttctttgtttggcatctgcagagacggtgaaaagcagagctccaggttgaaggatcagagtaatagatggagcccttaacatgagtaagagtgggtgcaggcagggcctgagtggtcactagaaatgagaaagcacagttggtgccatcacatacattaacctcctgctttattctgaagttcaagtatgagaatacgtgttgacatacaagccagctatggtaagaaattactcaaaattcagaatgctaattattttaatgataaaaatgagtagcgtctttgcccgtgtgatttggggccactaggtgtcgttgtaaccagcgtggatcctcgttagggcatgcagggatgaaagagacatggcaaatgaattttggatcgctaggatttaggaatctttgttattggctgagctgaggatgatttaaagttatccctgtctgaaatggtatcttttgtgaggaggtctgacttgctgaggctcagctgtttaatacaaatctggagaataaaccttaaggtggtttctgttagaatgaagcctgttatccttctcttttagattaaaggtggtggctgtggccttgaaaacagtcatgtgaaaactcatcaccttaaggtgttaagtgtaaggatcttcatgatgaaatttctgtaaatggtgcagtcagcctcagtttccaaagccggaaaaggatcctctagtagccacggtgtggcagctgctctgaaccaggacctggacccggacccaaagtgccatgtctttaatgttagctcccagcgatgccagatgggatcagcacagccctgcctctgctgctaattgttcctctaaagtaatcgccatgcgttctttgggcttcatctttaaaggaatgaagcaactgagattattctggaaaaccttttggcagttagtgaaattagagtacaactaagaacattttcagacctccactgtggatgacctgggtataatctcacaaatcgatgggactgcaaggattgtaaactgaaatgaacatgattatactctgttggaagagcctaagaggaaactgatgccatgagtttcagagagtaatgcttaaccccagttacacaggatgccgtcttgtgtttcctcttgtttagttacccactacagtgattttgtgatctgctaatgggttgccacccacaaccattgctttagcacttttacttcaaatcaatgaaggattgataaaagttctcctggtgtctccgcagagtgccttccaggaacagatctttgcatagaatatcagtggtttccttttttgtttcaaatagtggtcagaaaatacccagtgttgactcaccaaggcaatcagcttcctttttccctttttttgttttttttttaacattttatatttttgctttattttattttattttattttattttattttattttattttattttttgagacggagttccactctgtcgccaggctggagtgaagtggtacaatcttggctcactgcaacctccacctcccgggttcaagcaattctcctggctcagcctcctgagtgctgggactacaggcgcgtaccttctttagtagagactgggtttcaccatgttggccaggatggtctctatctcctgaccttgtgatctgcctgcctcagcttcccaaagtgctgagatgacaggtgtgagccatcagacccagcatttttttttttaatttaaatttaaattttttttcatttttttgagaggttttttttgttttgttttgttgttgttgttgttgttgtttttgagacagtcttgctctgtcacccaggctgggagtgcagtggcatgatctctgcaacctctacctcccaggttcaagcaattcttgtgcctcagcctcccaagtaactgggactacaggtgcacgctaccacacctggctgattttttttgttttagtagagacagggtttcaaccatgttgcccaggttggtctcaaactcctgagctcaggcaatccacccgccttggcctcccaaagtgctaggattacaggtgtgagccaccacacccagctattttttctttcgttttttaattttaaagttggggggggtctcaatttgttaccctggctggtctcgaactcccggacttaagcgatcctctggctccaagcccactacccgtctcaggtttctttactaaaagatcactacctttttttctcttatctgctgccatgtgagatgtggctttcaccttccgccatgattgtgaggccttcccagccacgtagaactgtaagtccaataaacctcttttgtaaattaaaaaaaaaaaatcactatttaagatactaggatggattgtgactgttgaggagtacttacatatcctacatttgactacattatttccaaaccaagtattccatccaaaggaacatactgctatcatagagaccaaggagggactgtttaaggttgccaaggtgaagcgagctgagaggctttgtcctcgtgccagtaactctgaaatctctcttaattcctgctgtccaggcagcagaatgccatggtttccccaagtaggtagctgctttagcagttaaagcccaaatgtctgttctgttgatcagaggtctctgaatttctgaagtggtgtttcgtttctggtgactgagttaatcctttacaatccctcttgtaaagtgtgctaatagaaagaatccacctttcaaagctgcagaaccagaccgtgccctaaattgaccaacgtagctgatgtgcctcaggaagtctcttgccagctgtccctgtgaagaccccctcctcccccccagctgctgccttgcacactgaagcatctcagactgtgcaaagccgtgtagtcatcaagacagtaaataccagggcttggttaagtgctgtgtgataacttgtttggatgagacttaacttaaaaccacttacaataaacttgggaaactacaaaaaaaaaaaaaaaa

SEQ ID NO: 2657 - DNA, 1852 bp, Homo sapiens
gtaaaaacaaccgtcctctccgtacagctgggtgtgtgtggcattctcatcctgggcatagatctggctcgtacggagaggacggttgtttttactcttcccctcctctcgtggaatgatgacattctcgtagcgattccggcactgtttggaagagcggtagattcggctacaggagttaacaacgtcactgacaagatcccaattaggtgtgtgagcaggtgacacgattgtgaggttcaaaggcagctccagtaactgctttacagcctgcagcagcgcccagtcctcactgatgagccactcggggttgtcttgaccaggctcagctgtgggtttggcaaaagttggcaggggcttggcgaatggcacctgctgcttcagcagaatattcttcttctgctccttgccctctctgcgaattttcagaagtcctggtgttgcgcggtcaaacagggaccgaggagggacgaccgcctccccgtgacgctgcttcttcttcctgcctgcagctgaggggtctgttttgtgtcgcttccgctccttcctcacgtacacagggggcagcttagcctctgggatgggagtggcttcatacatgagacacatgaccgagtcgaggtagatgtcgctgtcgtcctgcggcggggtgggtggggtccagagcggcatgacttctgtctgcccatcgacatcttcgtagacatactccatgctgtaggcatcctctcgcgtgtaggtcaggagctccgcctcctcctgctccagccgcagccgggcctccctctcctgcagggtcttcaggttccagaactcccatgccctcactgcagtcatcactgcgtcctcactgtttctctccttttcttgctcaatagaagtatggaataattccaggtaatttaaagcatatttttcaattggtgtaagctgctccatgaagtcagctagctcctctaattgggatggttcttcatcacacggcatgttctcagagtctgatgacagagcatcagtgtgtggtcccagcaccccctcctgtgcggacttctgggcatcctcctccagatactcaatactcttgagggcctctatgaaaggtcttgcaattttgggtgcaatggtttccgtgacagaaggttcctgagaaagcaccacaaactcctcagctttgaccgggaagccagcatcatccatgggagaataaacttcaaacagctcctggatggttcgctgagttaagaaagccatggagtagtcatttccctgagcagccacttctcggatcagatctttagttccatttttcaacaatttctcttcaatggaattgccactcacaagcctgtatatgtggatgtctttgcatctcccgatcctatcgcaccactcctgagctttggcatccatcactggattcaggtcattgtcataaaacacgacggtgtccgcctctacaaggtttatacctgtggtacggctgtgagtggagagaatggcacaaaaaatccgcctgtctctgttgaaactcctcatcagttcctgccgttgctcactgctggcattttcatcgattcttacataggtgaggtaatggaagttcaagaacatctctaaaatgtccaacataagaatcatctgtgataaaatcagcacccgacgtccttcagatttcaatttctgaagcaagatagctaaagcttccaacttccctgagtcgaactgcaccagcctcagctcagggaactgcagcaggcgtggagccgtggtctgccgcagctgctggaagtacggcgcagcgtgctctctcaggccctgcctcaagatcctcattctgtggctgtacaggggt

SEQ ID NO: 2658 - DNA, 1865 bp, Homo sapiens; identical to SEQ ID NO: 599

SEQ ID NO: 2659 - DNA, 10394 bp, Homo sapiens
gccgccatcttgcttctttttctcgctcgctcgctccccctcggaaagctgcgaaagtgctttggcggtttgtccatccgcagcttcggcttttccagtctggtggcccttccggccacccctttaaccccagctttccctcccccttctttcgatcagagatcggcggagaccctcgaagtgcgcaaacttgacactcaccctgaccggactggggttttaaggggtgtggcaggaggttttggactcgatgagtttccaccgaaatgtcggagaagtcaggccagagcacaaaagcaaaggatgggaaaaagtatgcaacactcagtttatttaatacttacaaggggaaatcattagaaacacagaaaaccacagctcgacatggattacagagtcttggaaaagtcggtatttcacggcgtatgcctccacctgctaacctcccaagtcttaaagcagaaaacaaaggcaatgatcctaatgtaaacattgtacctaaagatggcacagggtgggcatcaaaacaagagcaacatgaagaagaaaaaacaccagaagtgccaccagcacagccaaaacctggggttgcagctcccccagaagtagcacctgctcccaaatcatgggccagtaacaagcaaggtgggcaaggagatggaatccaagtgaatagtcagtttcagcaagaatttcccagcctgcaggcagctggggatcaggaaaaaaaagaaaaggaaacaaatgatgacaactatggacctggacccagtttacgtccaccaaatgttgcttgttggagagatggtggtaaggctgctggctcaccttcgtcatctgatcaagatgaaaagctccctggccaggatgaaagcacagctggaacatcagagcaaaatgatatcctcaaagtggtggaaaagaggatagcttgtggtcctccacaggctaaactgaatggacagcaggctgctctcgcttcccagtatagagctatgatgcctccttatatgttccaacagtatccgaggatgacatatcctcctctacatggtcccatgagattcccaccttctttatctgaaacaaacaaaggccttcgaggaagaggcccacctccttcatgggcctctgagcctgaacgcccatccattcttagtgcatcagaactgaaggagcttgataaatttgataacctagatgctgaagctgatgaaggttgggcaggtgctcagatggaagtagattatacagagcaactgaatttcagtgatgatgatgaacaaggaagtaacagtcctaaagagaataacagtgaggatcaaggttcaaaagcctctgaaaacaacgaaaacaaaaaagaaacagatgaagtttccaacactaaatcatcttcccaaatacctgcccaaccatcagtagcaaaagttccctatgggaaaggaccttcatttaatcaggaacgtggaacatcttcacatctgccaccacctccaaagttgcttgcacagcagcatccacctccagatcgacaggcagtacctggaagaccaggcccctttccctccaagcagcaagtagctgatgaagatgaaatatggaagcaaagacgaagacaacaatcagaaatttctgcagcagtagaacgtgctcgtaaacggcgtgaagaggaagagcgaagaatggaagaacaaaggaaggcagcttgtgcggagaaactgaaacgattggatgagaagcttggcatcctggaaaaacaaccatctccagaggaaattagggaaagggagcgagaaaaagaacgggagcgtgagaaagaacttgaaaaagaacaagaacaggagcgagagaaggagagggaaaaagacagagagagacagcaggaaaaggagaaagagctggagaaggagcaggaaaaacaaagagaaatggagaaagaaagaaagcaagaaaaagaaaaagaactagaacggcagaaagaaaaggaaaaagaactacaaaagatgaaagaacaagaaaaggaatgtgagctggagaaggaaagggaaaaattagaggagaaaattgaacccagagaacctaatttagagcccatggtagaaaaacaagaaagtgaaaacagctgtaataaagaggaggaacccgttttcactagacaagacagcaatcgcagtgaaaaggaagccacaccagtggtgcatgaaacagaaccagaatcagggtctcaacctcggccggctgtattatctggctatttcaaacagtttcagaagtctttacctccacgattccagcggcagcaggaacagatgaaacagcagcagtggcagcagcagcaacagcaaggtgtacttccacagactgttccttcacaaccgtccagtagtactgtccctcctccaccacacagacctctttatcagcctatgcagcctcatcctcagcatttggcttctatgggttttgatccaaggtggctcatgatgcagtcctacatggatcctcgaatgatgtcaggaagacctgctatggatattccacccattcatcctggaatgattcctcctaaaccattaatgagaagagaccagatggaagggtcaccgaacagttctgagtcatttgagcatatagctcgatctgcaagagatcacgcaatttccctttctgagcctcgtatgctgtgggggtcagatccctatcctcatgctgagcctcaacaagcaactactcccaaagcaacagaagagcctgaggatgtaaggtctgaagctgcgttggaccaggaacagattactgctgcttattctgtagaacataatcaattagaggctcacccaaaggcagactttatcagagaatcaagtgaggcacaagtacaaaagtttttaagcagatctgtggaagatgttagacctcaccatactgatgcaaataatcagtctgcttgttttgaagcacctgatcaaaagaccttatccgctcctcaagaggagcggatttcagctgtagaaagtcagccttcccggaaaagaagtgtttcccatggatctaaccatacgcaaaaaccagacgagcagagaagtgaaccatctgcaggcattcctaaagtaaccagcagatgcattgattcaaaagaaccaatagaaaggccagaggagaaaccaaaaaaggaaggctttatacgatcttctgaaggaccaaaacctgaaaaagtatataaatctaaatcagaaactcgttggggcccacgaccaagctctaacagaagggaagaagttaatgatagacctgtgagaagatcaggtcccattaaaaaacctgtacttagagatatgaaagaggaacgggaacagaggaaggagaaagaaggagaaaaggccgaaaaggtcactgaaaaagtagttgtaaagcctgaaaagacggaaaagaaggatcttcctcctcccccaccaccacctcagccaccagcaccaattcagccacagtcagttccaccaccaattcaaccagaagcagagaaatttccttcaacagaaactgcaactttggctcaaaaaccatctcaggatactgagaagcctctggaacctgtgagtactgttcaggtagagcctgcagttaagactgtaaaccaacagactatggcagcaccagtagtcaaagaagaaaaacaacctgagaaagtcatcagcaaagaccttgttatagagaggcctcgaccagattcaagaccagcagttaaaaaagaatcaactttgcctcccaggacctattggaaagaagctagagagagagattggtttccagatcaaggatacagaggtcgaggccgaggtgaatattactccagaggtcgaagctatagaggttcttatggagggcgtggcaggggtggtaggggacacactcgagattatcctcagtatagagacaataagccaagagcagagcatataccctcagggcctctcagacagcgagaagaaagtgaaacacggagtgagagctctgattttgaagttgtccccaaaagaagacgacagcggggttcagagactgacacagacagtgaaattcatgaaagtgcaagtgacaaggacagtttaagtaaaggcaaacttcccaaaagagaggaacggcctgaaaacaaaaaacctgtaaagcctcattcttctttcaagcctgataatcatgttcgaatagataatagactgctagaaaagccttatgtaagggatgacgataaagctaaaccaggctttcttcctaaaggagagcctacaaggagaggcagagggggaacattcaggcgtggtggaagggatcctggaggccgtccatcacgcccttccactttacgaagaccagcttatcgggacaatcagtggaacccaaggcagtcagaagttcctaaaccagaagatggagagccgccaagaagacatgagcagtttattcctatagcagcagataaacgacctccaaaatttgagcgaaaatttgacccagctagagaaaggcctcgaaggcagcgtcctactcgaccaccaaggcaagacaagccacctcgatttagacggctaagagagagggaggctgcttcaaaatcaaatgaggtggtagcagtgcccacaaatggcacagttaataatgtggctcaagaaccagttaatactcttggggatatttccgggaataagacaccagatttatctaatcagaactcttcagatcaggcaaatgaagaatgggaaacagcttctgaaagcagtgatttcaatgagaggcgagagagggatgaaaaaaaaaatgctgacttgaatgcacaaacagttgtaaaggttggagagaatgttctacctccaaagagggaaattgcaaagagaagtttttctagtcagagaccagtagatcgtcagaatcgacgtggcaacaatggtccacccaaatcaggaaggaatttctcaggtcctagaaatgaaaggagaagtggcccaccatcaaaaagtgggaagagagggccatttgatgaccagcctgcaggcacaactggggttgacctcatcaatggcagctctgcacaccatcaggaaggagtacctaatggtacaggacaaaagaactccaaagattctactgggaaaaaaagagaagaccccaaaccaggccctaaaaaaccaaaagagaaagtggatgctctatcacagtttgatctcaacaattatgcaagtgttgttataattgatgatcatcctgaagtaacagtaattgaagatccccagtcaaatttgaatgatgatggttttactgaagtggtatccaaaaaacaacaaaaacgtttacaggatgaagaacgccgaaagaaggaagaacaagtcatacaggtctggaacaaaaagaatgcaaatgaaaaaggaagaagccagacttctaagcttcctccaagatttgccaaaaaacaggctacagggatccagcaagcacagtcttcagcctcagttccacctctagcttcggctccacttccaccttcaacctcagcttcagttccagcctcaacctcagctccacttccggcaaccttaactccagttccagcctcaacctcagctccggttccagcctcaactttagctccagttctggcctcaacctcagctccagttccagcctcacccttagctccagtttcagcctcagcctcagtctcagcttcagttccagcctctacttcagctgcagctataacctcttcttcagctccagcctcagccccagctccaacccccatccttgcctcagtttcaaccccagcttctgtcaccattcttgcctcagcctcaattcccattcttgcttcagccctagcatcaacttcagctccaacgccagccccagcagcctcttccccagctgccccagtcatcacagcaccaactatcccagcctcagccccaactgcctcagtcccacttgcccctgcctcagcttcagccccagccccagcccctaccccagtctcagccccaaatcctgccccacctgccccagcccagactcaggcacagacccacaaaccagtccagaatccactacagactacatctcagtcttcaaaacaaccaccaccatcaattaggctgccttcagctcaaacacctaatggcacagattatgtagcctcaggaaaatccatccagaccccacagtcacatggcactctgacagctgaattatgggataacaaggtggccccaccagctgtgctgaatgatatctctaagaaattaggtcccattagtccaccacagccaccttcagtcagtgcatggaataagcccttaacatcgtttggatcagctccttcatcagagggagcgaagaatggtcaagaaagtggactcgaaattggaactgacacaattcagtttggtgctccagcctcaaatggaaatgaaaatgaagttgttcctgtgctttcggaaaaatctgctgacaaaatacctgaacctaaagaacagcggcagaagcagccacgagcaggacctatcaaagcccagaagcttccagatttgagtccagtagaaaacaaagaacacaaacctggtcccattggaaaggaacgttcattaaaaaatagaaaagtaaaagatgcccaacaggtggagccagaaggacaagagaaaccaagcccagctacagtcagaagcacagatcctgtcacgacaaaggagactaaagcagtctcagaaatgtctactgaaataggaacaatgatctcggtatcatctgcagaatatggtactaatgcaaaggagtctgtaacagactatactacaccctcttcttctttgcctaacaccgtggctactaataatacaaagatggaggatactttggttaataatgtgcccctgcccaacacccttcccctccctaagagggagactatacaacagagctccagcctaacttcagttcctcccactactttcagcctcaccttcaagatggagtctgcacgcaaagcatgggagaattctccaaatgtaagggaaaaggggtctccagtaacttccacagcacctccaattgcaactggagtcagcagtagtgccagtggaccaagcactgctaattacaattcgttctcaagtgcatccatgccccagattcctgttgcttcagtcactcctacagcatcactatcaggagctggtacatacactacctcttctttgagcacaaaatctacaaccacatcggaccctccaaatatttgtaaagtgaaacctcagcagttacagacaagcagcctgccttctgcaagtcatttttcacagttaagctgtatgccttcccttattgcccagcagcaacagaatccgcaagtttatgtgtctcagtctgcagcagctcaaatcccagccttctatatggacacaagtcatttattcaatacccaacatgcacgattggctccgccatccttggctcaacaacagggtttccaaccaggtctctctcagccaacttcagttcagcagattccaatccctatttatgcaccactgcaagggcagcatcaagcccaactgagtttgggggctggccctgctgtttcccaggctcaggaattgttcagctcctcacttcaaccatatagatctcagccagcttttatgcaaagcagtttatcccagccatctgtggtcctttctggtactgctattcacaactttccaactgtccaacaccaagaacttgccaaggcacaatccggtcttgcctttcagcaaacatcaaatactcagcccattcctatattgtatgaacatcaactggggcaggcatcaggactaggaggttcccagctgattgacacacatcttctccaggccagagcaaatcttacccaggcctcaaatctttattctggacaagtacaacagcctggtcagacaaatttttataacactgcccagtcaccaagtgctctccagcaggttacagtacctttaccagcatcgcagctttccttgcctaattttggatctacagggcaacctctaattgctttgcctcagactcttcagcccccattacagcataccactccccaagcacaggctcagagtctgagtcgtcctgcacaagtaagccagcctttcagaggattaattcctgctggaacacagcatagcatgattgcaaccacaggaaaaatgtctgaaatggaactaaaagcctttggaagtggcattgatataaaaccaggcacacctccaatcgctggtagaagcaccacaccaacatctagtcccttccgggctacttctacaagtccgaacagccagtccagcaaaatgaacagcattgtctaccagaagcagttccagtcagcccctgccactgtgagaatgacacaaccatttcctacacagtttgcaccccaggcaaagcagagagcagaggttcttcagtccacgcaacggttcttctctgaacagcaacagagcaaacagataggaggaggcaaagcccagaaagtggacagtgattcaagtaaacctcctgaaacactgaccgaccctcctggggtctgtcaggaaaaagtagaagaaaagccaccccctgcaccctccatagccaccaaacctgttagaactggaccaatcaaacctcaggcgatcaaaaccgaagaaacaaaatcttaaaggctatggtttattgcaggggattgggaggggggcgggaaaacatggagaattaagtcagataatgctggcagccaaaggggcaaaatggcctgtgacattatcctgttcagagcttggagatgtacaagggacataggagcaatttacactgacacacagctgctgtaccagtgaaaacgaggctttgcaagcttgtacctactatataacatgtgcttggttgatggccatgcatcttcagtcagaatttatatataaatgtatgcacccatttttttgagtgcatataatttagacctaaaaatccttatgattagatgaaacaccaaaaatataaggaaaataacacagcagaggaatagctcagcctgaacagtgtgatggtcccagctactacatcagatgcggtttttttgctcccttatgttcttcggatatggttatggcatttgtaggcttggaggtaaagaactgaagataactggtgctggatagaggagccttattttttattatggcagcttgctatttttataacatggtgattgagttgaacacaatcaaagtacagtagtaactgatgtccccttcttcctggatgaatgagcagataaatattgatgtcagcatccttgaaccatatcaaagtgagcagtgtttggctactgcttctatttgaaatggtgctgtgttttggttgtggtctgaagctttgaagcgctacttagcatctcctttcttccatggagctctcacgattcaaacatgacagatttggtaaaatgctggttaggttgagtcttccttgcccccactcagtcatctttgtatgaatcccatgatttgggggtttttttctttttttttttataccagtttttagctggtgtttatgaagaacagtgagtacctagaactgtgccactaattaaaggaaatcctaagaaggtgcatttctttacagagctgtgtcatgccatcctttgggccctctgctggaaaagtagaatcaagtctcaaataatgcctttttaattgtatcctctagtattatagatataggacagtactgtatcatacctctgtgaatgtaaaatatcttgtacctgctttatgatacgtagtagtgaccgtgctttatcagagctgtttttaatgatgttattctagaatgttttctttccagatgatgattcagaagctaattttaaaaaacggtgccaggtaccacaacagtaacagaactttgcaattttctggggttttgttttttacctttttccccccttttttttaaatggagtgtgctggatgtctctataattttattcagatgactgcagaacctggaaaagctgttgctgctattgatgcataacatactgctattggtctttttatataaatatatatatatatatacatatatatatataatttgaatttttggaaactttagctgtgctgtcaactttggaaaaagtatcccggtttactgtgttgagttggcattgtacagaaattaacagccatattggtctagaaacgttaaacttaatttttttccatttgtacaggggtaacgcactgtattaaatatgtaaggtcttatctacatgggtttgattacagaaactaataaagtattctctaaataatgaaaaaaaaaaa

SEQ ID NO: 2660 - DNA, 3219 bp, Homo sapiens
agactctcaggttgatgcagtgttccctcccacaactctgacatgtatataaattctgagctctccaaagcccactgccagttctcttcggggactaactgcaacggagagactcaagatgattccctttttacccatgttttctctactattgctgcttattgttaaccctataaacgccaacaatcattatgacaagatcttggctcatagtcgtatcaggggtcgggaccaaggcccaaatgtctgtgcccttcaacagattttgggcaccaaaaagaaatacttcagcacttgtaagaactggtataaaaagtccatctgtggacagaaaacgactgtgttatatgaatgttgccctggttatatgagaatggaaggaatgaaaggctgcccagcagttttgcccattgaccatgtttatggcactctgggcatcgtgggagccaccacaacgcagcgctattctgacgcctcaaaactgagggaggagatcgagggaaagggatccttcacttactttgcaccgagtaatgaggcttgggacaacttggattctgatatccgtagaggtttggagagcaacgtgaatgttgaattactgaatgctttacatagtcacatgattaataagagaatgttgaccaaggacttaaaaaatggcatgattattccttcaatgtataacaatttggggcttttcattaaccattatcctaatggggttgtcactgttaattgtgctcgaatcatccatgggaaccagattgcaacaaatggtgttgtccatgtcattgaccgtgtgcttacacaaattggtacctcaattcaagacttcattgaagcagaagatgacctttcatcttttagagcagctgccatcacatcggacatattggaggcccttggaagagacggtcacttcacactctttgctcccaccaatgaggcttttgagaaacttccacgaggtgtcctagaaaggatcatgggagacaaagtggcttccgaagctcttatgaagtaccacatcttaaatactctccagtgttctgagtctattatgggaggagcagtctttgagacgctggaaggaaatacaattgagataggatgtgacggtgacagtataacagtaaatggaatcaaaatggtgaacaaaaaggatattgtgacaaataatggtgtgatccatttgattgatcaggtcctaattcctgattctgccaaacaagttattgagctggctggaaaacagcaaaccaccttcacggatcttgtggcccaattaggcttggcatctgctctgaggccagatggagaatacactttgctggcacctgtgaataatgcattttctgatgatactctcagcatggatcagcgcctccttaaattaattctgcagaatcacatattgaaagtaaaagttggccttaatgagctttacaacgggcaaatactggaaaccatcggaggcaaacagctcagagtcttcgtatatcgtacagctgtctgcattgaaaattcatgcatggagaaagggagtaagcaagggagaaacggtgcgattcacatattccgcgagatcatcaagccagcagagaaatccctccatgaaaagttaaaacaagataagcgctttagcaccttcctcagcctacttgaagctgcagacttgaaagagctcctgacacaacctggagactggacattatttgtgccaaccaatgatgcttttaagggaatgactagtgaagaaaaagaaattctgatacgggacaaaaatgctcttcaaaacatcattctttatcacctgacaccaggagttttcattggaaaaggatttgaacctggtgttactaacattttaaagaccacacaaggaagcaaaatctttctgaaagaagtaaatgatacacttctggtgaatgaattgaaatcaaaagaatctgacatcatgacaacaaatggtgtaattcatgttgtagataaactcctctatccagcagacacacctgttggaaatgatcaactgctggaaatacttaataaattaatcaaatacatccaaattaagtttgttcgtggtagcaccttcaaagaaatccccgtgactgtctataagccaattattaaaaaatacaccaaaatcattgatggagtgcctgtggaaataactgaaaaagagacacgagaagaacgaatcattacaggtcctgaaataaaatacactaggatttctactggaggtggagaaacagaagaaactctgaagaaattgttacaagaagaggtcaccaaggtcaccaaattcattgaaggtggtgatggtcatttatttgaagatgaagaaattaaaagactgcttcagggagacacacccgtgaggaagttgcaagccaacaaaaaagttcaaggatctagaagacgattaagggaaggtcgttctcagtgaaaatccaaaaaccagaaaaaaatgtttatacaaccctaagtcaataacctgaccttagaaaattgtgagagccaagttgacttcaggaactgaaacatcagcacaaagaagcaatcatcaaataattctgaacacaaatttaatatttttttttctgaatgagaaacatgagggaaattgtggagttagcctcctgtggtaaaggaattgaagaaaatataacaccttacaccctttttcatcttgacattaaaagttctggctaactttggaatccattagagaaaaatccttgtcaccagattcattacaattcaaatcgaagagttgtgaactgttatcccattgaaaagaccgagccttgtatgtatgttatggatacataaaatgcacgcaagccattatctctccatgggaagctaagttataaaaataggtgcttggtgtacaaaactttttatatcaaaaggctttgcacatttctatatgagtgggtttactggtaaattatgttattttttacaactaattttgtactctcagaatgtttgtcatatgcttcttgcaatgcatattttttaatctcaaacgtttcaataaaaccatttttcagatataaagagaattacttcaaattgagtaattcagaaaaactcaagatttaagttaaaaagtggtttggacttgggaacaggactttatacctcttttactgtaacaagtactcattaaaggaaattgaatgaaattaaaaaaaaaaa

SEQ ID NO: 2661 - DNA, 2276 bp, Homo sapiens; identical to SEQ ID NO: 2292

SEQ ID NO: 2662 - DNA, 1172 bp, Homo sapiens
ctgggactgaggtgttctaagcctggaaagacacaaagctgtcctcatcccaacctgccgtgcccctccttgagggttagtgtaaggctctgaaggactgtgtgaattatggtggtgctacaaacaagctcatctttggaactggcactctgcttgctgtccagccaagtacatatccagaaccctgaccctgccgtgtaccagctgagagactctaaatccagtgacaagtctgtctgcctattcaccgattttgattctcaaacaaatgtgtcacaaagtaaggattctgatgtgtatatcacagacaaaactgtgctagacatgaggtctatggacttcaagagcaacagtgctgtggcctggagcaacaaatctgactttgcatgtgcaaacgccttcaacaacagcattattccagaagacaccttcttccccagcccagaaagttcctgtgatgtcaagctggtcgagaaaagctttgaaacagatacgaacctaaactttcaaaacctgtcagtgattgggttccgaatcctcctcctgaaagtggccgggtttaatctgctcatgacgctgcggctgtggtccagctgagatctgcaagattgtaagacagcctgtgctccctcgctccttcctctgcattgcccctcttctccctctccaaacagagggaactctcctacccccaaggaggtgaaagctgctaccacctctgtgcccccccggcaatgccaccaactggatcctacccgaatttatgattaagattgctgaagagctgccaaacactgctgccaccccctctgttcccttattgctgcttgtcactgcctgacattcacggcagaggcaaggctgctgcagcctcccctggctgtgcacattccctcctgctccccagagactgcctccgccatcccacagatgatggatcttcagtgggttctcttgggctctaggtcctggagaatgttgtgaggggtttattttttttaatagtgttcataaagaaatacatagtattcttcttctcaagacgtggggggaaattatctcattatcgaggccctgctatgctgtgtatctgggcgtgttgtatgtcctgctgccgatgccttcattaaaatgatttggaagagcaaaaaaaaaaaaaaaaaaaaaaaaaa

SEQ ID NO: 2663 - DNA, 4942 bp, Homo sapiens
gtgatggcctccctgaaattaaacatttctattagtggcttcccgttaatctcatccttcttagatcaaacctcgttatatctcctgcctatctcttttgcattccaaagttcagttttattaaatcccagggtctaagattttttctttgagaatttatctccagtgtttctatggaaattaaaaaagaaaattaggataattcaatgtcgaaatgttgcatgcatcttttgagaaatttatattttgtaggttgaaggacttgctttttgggcagcgtatttttggaggtggaatgtagttattttaataaccatgtcctaattatttatagcttcctgcctgacacagctcacttcaagaagtgcacaatgtcagaacgtggaattaagtgggcttgtgaatattgtacgtatgaaaactggccatctgcaatcaagtgtactatgtgtcgtgcccaaagacctagtggaacaattattacagaagatccatttaaaagtggttcaagtgatgttggtagagattgggatccttccagcaccgaaggaggaagtagtcctttgatatgtccagactctagtgcaagaccaagggtgaaatcttcgtatagcatggaaaatgcaaataagtggtcatgccacatgtgtacatatttgaactggccaagagcaatcagatgtacccagtgcttatcccaacgtaggaccaggagtcctacagaatctcctcagtcctcaggatctggctcaagaccagttgctttttctgttgatccttgtgaggaatacaatgatagaaataaactgaacactaggacacagcactggacttgctctgtttgcacatatgaaaactgggccaaggctaaaagatgtgttgtttgtgatcatcccagacctaataacattgaagcaatagaattggcagagactgaagaggcttcttcaataataaatgagcaagacagagctcgatggaggggaagttgcagtagtggtaatagccaaaggagatcacctcctgctacgaagcgggactctgaagtgaaaatggattttcagaggattgaattggctggtgctgtgggaagcaaggaggaacttgaagtagactttaaaaaactaaagcaaattaaaaacaggatgaaaaagactgattggctcttcctcaatgcttgtgtgggggttgtagaaggtgatttagctgccatagaagcatacaagtcatcaggaggagacattgcacgtcagctcaccgcagatgaagtacgcttgctgaatcgtccttctgcctttgatgttggctatactcttgtacacttggctatacgttttcagaggcaggatatgctagcaatattgcttacagaggtgtctcaacaagcagcaaagtgtattccagcaatggtgtgtcctgaactgacagaacaaatccggagagagatagctgcctctcttcatcagagaaagggggattttgcttgctattttctgactgaccttgtaacatttacattgccagcagatattgaagatttgcccccaacagtccaagaaaaattatttgatgaggtgcttgatagagacgttcaaaaagaattagaagaagaatctccaattattaactggtccttggaattggctacacgtttggacagtcgactgtatgcactttggaaccggactgcaggagactgcctacttgattcagttctacaagctacctggggcatctatgacaaggactcagtgcttcggaaagccctgcatgacagcctgcatgactgttcacattggttttacacacgctggaaagattgggaatcatggtattctcagagctttggtttacatttttccttgagagaagaacagtggcaagaagactgggcatttatactctctcttgctagtcagcctggagcaagcttggagcagacgcacatttttgtactggcacatattcttagacgaccaattatagtttatggagtaaaatattacaagagtttccggggagaaactttaggatatactcggtttcaaggtgtttatctgcctttgttgtgggaacagagtttttgttggaaaagtccgattgctctgggttatacgaggggccacttctctgctttggttgccatggaaaatgatggctatggcaaccgaggtgctggtgctaatctcaataccgatgatgatgtcaccatcacatttttgcctctggttgacagtgaaaggaagctactccatgtgcacttcctttctgctcaggagctaggtaatgaggaacagcaagaaaaactgctcagggagtggctggactgctgtgtgacggaggggggagttctggttgccatgcagaagagttctcggcggcgaaatcaccccctggtcactcagatggtagaaaaatggcttgaccgctaccgacagatccggccgtgtacatccctgtctgatggagaggaagatgaggatgatgaagatgaatgaaaaaaaaaatcaaacagcagaagaccaaggcatcagatctgtaatgaccctaaagttagtgtggtgctccaagcagagtcgacatcatggaatgaaccaaatctggcaggatctgctcggggaagtgttttcctggaccacacacaccttatggagataatgcctctgctgcgtgaggagacagagaactttagttggactacagtttgtaaaaaaaactaattttattaagacagaactttttttccttccaaattgtaaatctgtctataaatgtaacgcatgtggttgtgtaagacattgtttaataggaaaagttgtaccagcatcttcatattattgagaaaattttttccagcatgggcacttagaaaaagcacatggcaaatggctctttgttcctttcagatattatttcagtagaacctggcattctactttcaccttaaaagatccatctaagtctcagatctggaaacgttttgtaccgattatccacagcaaaacaaaaataagcttttattttattaataatttcgttcctcttgtgcccaatcaaatcttttaggaacaaactgcaagaaaagctaagaatgttttagagtgaactaaatacagacattgcttacttgttttgaagagggttttggttttggttattgtgtctttaagttttctgatatgccccctttcaatatttagatatttatttgttgggaagaataccttaaaatgagggttcttattccagattctgggcagtggtctgtgagtagtttttttcctggatgaaaagggagcaagcccacttgtcactaaatgaattgtgtgaaatgtgctcacttggactccatcaacaatgtgctgctcccagattgccatgccagagggtcttcggattcttccttctatcacctctgctctaagcaaatcttgttagaagggcatgcctttgcttaggcagattgggaataccaattcactacagaataaagattttaaaaatgcaataaggtggcaaatgcattgtatgaagaatttctcagtgtttagtctgagaatttttgcatgttggttaattgtggccattctttaatttaaagttaaaactataatcttaggtagaaaaacttttttataagaagtattatttgaccacttcaggtatacattcaatactgggtaaaaatttcagacctatctcaggaacacagaaatatttggtgtcctgataagcactttctagactattgatgtggccaggaatttggaaagacgacacacgcacgcgcgcgcgcgcacacacacacacacacacacacacacacacagttttttccttccctgtgatgaaaaaggctgtgaaaaccttaaagtatttgcttgcttcttgttttgtttagttgataatgaaatgtgtacaacctcaaatttgctgccagaatactaaaaatagaaaaatacccacaaaactgtcatgtctttagttctttccccccgaaaactcagtaaaaaggtgttcccaggatgaaaagatcattttttgctgcatgctaaatcttgcaggaaaaatgattttttagtacgattctgtagaaatgaatctttgatataatgtaaatgctgctgtttgtttcaagtggtgaatgtgttgttaaaaattggctgtttgctttcattttggccaataagtaatcaagtttgtagaaaatgttagcattctgactacttagcatctgtagtaatttctctatgtatagggataattttttagtgggcagagatcctgttctagttgcctgttaagcaaaatctgccctcccaattgaaaaagccaaagagaattgttagagggaaaagcatgtagccattgcagtctgcattgcagccagcgttgtccagagtacacgctcagcacttagcttctactgtgtgttgtggtctggtgagtgttgtttcccctgagcgctctattatttatttatttattatcaatcagtgaccctgaccacatagtgtgataggtgcagcattcttccctgtgggaaagaattaaagatggttccatttcctaggctacagacaggaatggggctctaaatggttttcatagactggctgttaaaggccaaaaattttggtaaatcaatgctatattatgctcttgaactattaaaacagccataattattgtcccaagatagaatatagtcctttttcaaagatgattatacgtggctaggtgacagacattaatgactgactctggagagtaagtcatacctgcactctgtggacttgatggttctttttctagagcaaacagagcgtggcattttgttttgacttgttcttccttggggtcaaatttatatatatatatataaatttttgtttgggcgaccaagatctaataattaaaacccaggtggaccatggattca

SEQ ID NO: 2664 - DNA, 1205 bp, Homo sapiens
gaccactcagacaccgtgtcctcttgcctgggagaggggaagcagatctgaggacatctctgtgccaggccagaaaccgcccacctgcaggtgaggcccggacccctgcccagttccttctccgggatggacgtggggcccagctccctgccccaccttgggctgaagctgctgctgctcctgctgctgctgcccctcaggggccaagccaacacaggctgctacgggatcccagggatgcccggcctgcccggggcaccagggaaggatgggtacgacggactgccggggcccaagggggagccaggaatcccagccattcccgggatccgaggacccaaagggcagaagggagaacccggcttacccggccatcctgggaaaaatggccccatgggaccccctgggatgccaggggtgcccggccccatgggcatccctggagagccaggtgaggagggcagatacaagcagaaattccagtcagtgttcacggtcactcggcagacccaccagccccctgcacccaacagcctgatcagattcaacgcggtcctcaccaacccgcagggagattatgacacgagcactggcaagttcacctgcaaagtccccggcctctactactttgtctaccacgcgtcgcatacagccaacctgtgcgtgctgctgtaccgcagcggcgtcaaagtggtcaccttctgtggccacacgtccaaaaccaatcaggtcaactcgggcggtgtgctgctgaggttgcaggtgggcgaggaggtgtggctggctgtcaatgactactacgacatggtgggcatccagggctctgacagcgtcttctccggcttcctgctcttccccgactagggcgggcagatgcgctcgagccccacgggccttccacctccctcagcttcctgcatggacccaccttactggccagtctgcatccttgcctagaccattctccccaccagatggacttctcctccagggagcccaccctgacccacccccactgcaccccctccccatgggttctctccttcctctgaacttctttaggagtcactgcttgtgtggttcctgggacacttaaccaatgccttctggtactgccattcttttttttttttttttcaagtattggaaggggtggggagatatataaataaatcatgaaatcaatacataaaaaaaaaaaaaaa

SEQ ID NO: 2665 - DNA, 2100 bp, Homo sapiens
agtcaccgaggcccggacctgcggcgtcggcggcgcgcgcagagggccaggcgggcgtagaggccggaccgacgcgtggcggcagagggtatccaaggccggacctggcgcgcaggcgctgacccgacctggcagtgagctggccgcggccttggctgagaggccttaaccccgccgggcggccgcgccctgcatgcgagttgggccgcgggcggggttggagcctactcggggcgactgcgatggacgccttagaaggagagagctttgcgctgtctttctcctccgcctctgatgcagaatttgatgctgtggttggatatttagaggacattatcatggatgacgagttccagttattacagagaaatttcatggacaagtactacctggagtttgaagacacagaagagaataaactcatctacacacctatttttaatgaatacatttctttggtagaaaaatacattgaagaacagctgctgcagcggattcctgagttcaacatggcagccttcaccacaacattacagcaccataaggatgaagtggctggtgacatattcgacatgctgctcaccttcacagattttctggcttttaaagaaatgtttttggactacagagcagaaaaagaaggccgaggactggacttaagcagtggcttagtggtgacttcattgtgcaaatcatcttctctgccagcttcccagaacaatctgcggcactaggtcctacctccagccaatgaatgggatcattctggatgtcaccagcccaataggctcagctcatgatgacagaacacatcttggaaagactgactctgttatgtaactcttcatttatgttaagtattaataggtcaaaaccaaaatgacctaaccctcctggacctatttatcctgaaacaccttcttgtattcattaaccatagtactcctccccacctcaagtagacacctctctcaggagcttctgagtcagacgcctctggagcgagccctatgtcaggcactccacctggggggcccttccccagcatacctgctggtgtgtaagtgtggactaacccgccgccaccaccctctgttccagcaggctctgcatgaatctttgtgcacttgcacctctttttcacatgggccacagtttcagtacttcagcctcagtggggttcctgatgtttatctagggtgttactcaagcccagtttgagattttggagtctcctgtgatcacatcttgtctcggctgtaggaatcaacagaaggagacgtcctctacataaaagctccatgtgaaaagctactcctagtcttaacatttgcagtccttgtgtcactgtcttctggtcctgatgtagtcccactgtttctagaagtctcttttaagcattatttttgaaaaaaaaaatatttttatagatgaatactcaggctaacctagtggatgtgatcttggaacttccatgattatccacttaaagatcaaagtattatatgctgtgtgctttttaggtgtttgttagtactgtgaaggcaaaaatgctttctacattgacattcattcctattttactgggcacctatgaatgtatgctgtgtgctagaaatagactaaaacatattcctatagcatgttagtgtgtttgcatgtttgctgaaaatcctttgtgtataaaccagtttgtaaggttctctgggttaggtagggactctgcagtttcttcctgtcaaaatctctcctaccaagatggtgttccactgtccagcccagcatgagtagcaggtagagcacagctttactggctgtttgtatgctttggtttagtgcaatgtgtggtagattacttatcagaaaacatatatgtcatctctagaacgaagaaaaagcatagtagttcaattcccagtgtgtccctttgattttttttttttaatagtaaaaataagaatctgtactgacttttcacttggccattctggttttaaaggacaagctacaagctctgtgtttctgtactgatgtgtcacttattaaatacttttgtaccatgagtaaaacttcaggtgtttcgcaagaaccaccattctc

SEQ ID NO: 2666 - DNA, 2463 bp, Homo sapiens
caccgcagccgctgcattcaggaaccgctttagcttcgcccccggccggccgggcggggaagactggtgtggtctggccatggatgggctccaggccagtgcagggccgttgaggcgcgggcggccgaagcgccggcgcaagccccagccacacagcgggtcggtcctggccctgcccttgaggtccaggaagatacgaaagcagctgcgaagtgttgtatcccgcatggcagcgctgaggacgcagacgctgcctagcgagaactcggaggaatcgagggtggagtcgacggccgacgacctgggggacgcgctacccggtggggcggcggtggcggccgtcccggacgcagcccggcgagagccatacggccacctggggcccgcagagctgctggaggcctcgcccgccgcgcgctccctgcagaccccgtcggcgcgcctggtgcccgcttccgcgccgcccgcgcgcctggtggaggtgcccgccgcgccggtccgggtggtggagacctcggccctgctgtgcaccgcgcaacacttagcggccgtccagtcgtccggggcccctgcgacggcgtcggggccgcaggtggataacacgggtggggagccggcctgggactccccgctgcggcgcgtcttggccgagctgaaccgcatccccagcagccggcggcgagcggcccgcctctttgagtggctcatcgcgcccatgccgccagatcacttttaccggcgcctatgggagcgcgaggcggtgctggtgcggcggcaggaccacacctactaccagggacttttctctaccgctgacctggattcgatgctgcgcaacgaggaggtgcagttcggccagcatttggacgccgctcgctacatcaacggacgacgcgagaccctgaacccacccggccgcgcgctgcccgccgccgcgtggtccctgtaccaggccggctgctccctgcgtctcctctgtccgcaggctttctctactactgtgtggcagtttttggctgtgcttcaagagcagtttggaagcatggcaggctccaacgtttacctcacgccccctaactcgcagggctttgccccccactacgacgacatcgaggccttcgtgctgcagctggaaggtaggaaactctggcgtgtataccgaccccgagtcccaaccgaggaactggctctgacatccagccccaacttcagtcaggacgacctcggtgagccggtgctgcagaccgtgctggaacctggagatttgctgtattttcctcggggcttcattcaccaagctgaatgccaggatggagtccactctctgcacctcaccttgtccacgtaccagcgcaatacctggggtgacttcttagaggccatactgcctctggcagtgcaggctgcaatggaagaaaatgtggagtttcggaggggtctgccccgagacttcatggattacatgggggcccagcattcagattctaaggatccgcgaagaaccgctttcatggagaaggtgcgggtcttggttgcccgcctgggacactttgctcctgttgatgctgtggccgaccagcgagccaaagacttcattcacgattctctgccccctgttttgactgatagggagagggcactaagtgtttacgggcttccaattcgctgggaggctggagaacctgtaaacgtgggggcccagttgacaacagaaacagaagtccatatgcttcaggatgggatagctcggctggtgggtgaggggggccatttgtttctctattacacagtggaaaactcccgtgtgtatcatctggaagaacccaagtgcttggaaatatacccccagcaagctgatgccatggaactgttgcttggttcttatccagagtttgtgagagtgggggacctgccctgtgacagtgtggaggaccagctgtccttggcaaccacgttgtatgataaggggctgctgctcactaagatgcctctagccctaaattagtttcttgttgattgctggaaacaaggcagtagtgattctccgctgccactgctaccttttttttttttttttccttaaactcacgttcttaccttgataagcatcagtgtgctcacatttacctttatcactgcttcagtgtcacaaacctcggaaggtcttctaggaagaaccatctcatctaggtacaaaaggaaaaggagaagttggaggtggaaaaaaaacccttgatccgtgatcatttcagagcaccaacttcatcaccttcaggcttcagtgtactgggtaacactgaccatgtcgttctgcttgagacagatattagattttttttggaatttggatctttcatctgagttctttttcatgggcgggtcggggtcagtatcctgtttgttattgttaaatttgtatgaaccttagaaaagttattaaagtgccaaagaatgtttcccttt

SEQ ID NO: 2667 - DNA, 1709 bp, Homo sapiens
aaacagcggacggaggggccggcggtggcggagccggagcaagcaggggttcggcggcattacctgtacccattcaccggcggctaccggcggcggcgcgcagcgtgtcaggcggagagacccgccgccaggaatgaatctgaagtctgctgcagtaaaacacagaaggctttaaaatgttttcttgcataaaattcaaaacttttaagtagctgcttatgagaatagggaaggcagaaagctaatgtctgtctcaagatacaggacagctgtttgctcatcaacctcaactgtgtgtgcaactgaggaacatggctcaagaaactaatcacagccaagtgcctatgctttgttccactggctgtggattttatggaaaccctcgtacaaatggcatgtgttcagtatgctataaagaacatcttcaaagacagaatagtagtaatggtagaataagcccacctgcaacctctgtcagtagtctgtctgaatctttaccagttcaatgcacagatggcagtgtgccagaagcccagtcagcattagactctacatcttcatctatgcagcccagccctgtatcaaatcagtcacttttatcagaatctgtagcatcttctcaattggacagtacatctgtggacaaagcagtacctgaaacagaagatgtgcaggcttcagtatcagacacagcacagcagccatctgaagagcaaagcaagtctcttgaaaaaccgaaacaaaaaaagaatcgctgtttcatgtgcaggaagaaagtgggacttactgggtttgaatgccggtgtggaaatgtttactgtggtgtacaccgttactcagatgtacacaattgctcttacaattacaaagccgatgctgctgagaaaatcagaaaagaaaatccagtagttgttggtgaaaagatccaaaagatttgaactcctgctggaatacaaaattcttgagcatctgcaaactaaaaattgacttgaggttttttttttcctagtcattgggaatgtagagcagtgtatcttgcatgtcatcggaagaatagatttttgttttggttttgttttgaaaatgactctgaacatttatttccattgcaatttctgtggctgaggagacttaaactttacaagtattatccttttaagatcattttaattttagttgagtgcagagggcttttataacaaacgtgcagaaattttggagggctgtgatttttccagtattaaacatgcatgcattaatcttgcagtttattttctcattgtgtatgtatatatcgcttttctctgcagcacgatttctcttttgataatgccctttagggcacaactagttatcagtaactgaatgtatcttaatcattatggctgcttctgttttttcattaacaaaggttattcatatgttagcatatagtttctttgcacccactatttatgtctgaatcatttgtcacaagagagtgtgtgctgatgagattgtaagtttgtgtgtttaaacttttttttgagcgagggaagaaaaagctgtatgcatttcattgctgtctacaggtttctttcagattatgttcatgggtttgtgtgtatacaatatgaagaatgatctgaagtaattgtgctgtatttatgtttattcaccagtctttgattaaattaaatgaaaaaaaaaaaaaaaaaaaaaaaaaaaaa

SEQ ID NO: 2668 - DNA, 4007 bp, Homo sapiens
cgcacacatacagagtcggccacacgcgcgccgcccggccccactcgcgcagcgcgggcctccgccggccgcattgtccgcccgcccgccttgtcccgcgtcgccgctcttcgcgtgcccgcgcgccccgggcccggccgctgtgtcgccctgagcggagcgccgcccgcgggatccccacgcggaaagggggcgcgccccggcggcggcctggcctcggacgcccccggccgggctagaagccgccgcggcagcagattctcttcaggggaagagtccacatcccacctcatcatgtcccgaagaagccagcgcctcacgcgctactcccagggtgacgatgacggcagcagcagcagcggagggagctcggtggctgggagtcagagcaccctgtttaaagacagtcctctcaggaccttgaagaggaaatccagcaacatgaagcgcctgtccccagcgccacagctgggcccgtcctctgatgcacacacctcctactacagtgagtcgctggtccacgagtcctggttcccacccaggagctccctggaggaactgcatggtgacgccaactggggtgaggacctgcgggtgcggaggaggagaggcacgggtggctcagagagcagcagggccagcgggcttgtggggcgcaaggccaccgaggacttcctgggctcttcctcgggctactcctctgaggacgactacgtgggctactcggatgtggaccagcagagttccagctcgcggctccgaagcgccgtctcacgggcgggctccttactctggatggtggccacttcgccaggccggctcttcagacttctctactggtgggctggcaccacctggtaccgcctgaccacagctgcctccctccttgacgtcttcgttttaaccaggcgcttctcgtccctgaagacgttcctctggttcctgctgccgctgctcttgctgacgtgcctgacgtatggtgcttggtatttctacccctatgggctgcagacattccaccctgctttggtttcctggtgggcagcgaaggacagcaggaggccggatgagggctgggaagccagagactcatcgccacatttccaggctgagcagcgtgttatgtcccgggtacactctctggagcggcgtctggaagctcttgctgctgaattttcctccaactggcagaaggaggccatgcggctggaacgtctggagctgcggcaaggggctcctggccagggaggtggtggtggcctgagccacgaggacaccctggcgctgctggaggggctagtgagccgccgtgaagctgccctgaaggaggatttccgcagggaaactgctgctcgcatccaggaagaactgtctgccctgagagcagagcatcagcaagactcagaagacctcttcaagaagatcgtccgggcctcccaggagtccgaggctcgcatccagcagctgaagtcagagtggcaaagcatgacccaggagtccttccaggagagctctgtgaaggagctgaggcggctggaggaccagctggccggcctgcagcaggagctggcggctctggcactgaagcagagctcggtggcggaagaagtgggcctgctgccccagcagatccaggccgtgcgggacgacgtggaatctcagttcccggcctggatcagtcagttccttgcccgaggtggagggggccgcgtggggctccttcagagagaggagatgcaagctcagctgcgagagctggagagcaagatcctcacccatgtggcagagatgcagggcaagtcggccagggaagccgcggcctccctgagcctgacgctgcagaaagaaggtgtgattggagtgacagaggagcaggtgcaccacatcgtgaagcaggccctgcagcgctacagtgaggaccgcatcgggctggcagactacgccctggagtcaggaggggccagcgtcatcagcacccgatgttctgagacctacgagaccaagacggccctcctcagcctcttcggcatccccctgtggtaccactcccagtcaccccgagtcatcctccagccagatgtgcacccaggcaactgctgggccttccaggggccacaaggcttcgccgtggtccgcctctctgcccgcatccgccccacagccgttaccttagagcatgtgcccaaggccttgtcacccaacagcactatctccagtgcccccaaggacttcgccatctttgggtttgacgaagacctgcagcaggaggggacactccttggcaagttcacttacgatcaggacggcgagcctattcagacgtttcactttcaggcccctacgatggccacgtaccaggtggtggagctgcggatcctgactaactggggccaccccgagtacacctgcatctaccgcttcagagtgcatggggagcccgcccactagccctgcttactggtgcctgctgccagccatctgggagtgggtgaacagcaccccgccgcttcccccacacgcttgctcggcgctctgacttctaggagcacaagagaggagcctgtggccccatgcagatgaaaaggacgggcagggtctcctgagcagcaggtggctcgaggcggttagcaggctccagcagctcccttcttccttccctctgtgcccgtggcgtctgcttcccatcctgggagtgtgtatatatgtagcatatcatgggggactgggaagttgggagaggtaggacctgactggtcttggctggggtcaggggctggtgcctgggagctgatgaagcaggtgccagggctgtgggaggggcaagctacggcctgggctaggtgagctgcctctgcccctgggcaaggaagcgaggccctctgggaggagggtgcttagctccagagcaggatgggacttccccaggcaggaagcacttgatggagagctgcccagctctcctacaaggttagtgccctccacctagggaagcatgaaccacagggtccctgagggccttcgacaaaagtgtgtatttgtcccggggagggtagcagtgggccatggggcttcttgtgccctaaaggggactggctgctgtgatcttctaaggggcccagggccaaccctgtaggcttcccctctgctggggacggtagttgcttttctctctcctgatgctaggttggggcccaccctgctccctgttcctgctagggcctgccagtgcccctgagcttgctttccacattctcccagggtatggagacctagacctgtctttggggccattagcatctggggttatagcaagaagagtggggagcatggaactcctgggctcttgtggggacgttcagggtatcggggtgcgaggtctgtctgcaccggcccccacatctaaccaggccctgatgtaggggtcgtccgctcaggctgcccccttgggctcttgcagctcttgttcaggtagtcgcccttctggtttgttctctgtggggcagttggtgggggctgggggaagaggctggcagaagttaccctggatagggaagggggaggaggggacttttagagccagcaggccccactgtattatgtatatatttttcaaggtctgtttttctaactgaaaagctaagggcttgattcctagccccgttctgtggggcactgggtgatactcagtttcttgttcctggccgtggagaggggcctggggcactggttccggctgtgtctggtggtctggctgcggggaaggggcaagaaggcgggcaggccttcactgcagcactgagcctcaaatccgctctggagcatgaggctggatgcagtggtggtgaggccgccccgctccatcccgaggcagccagggtttgttttgcgctctcctgtcacaaatgctgcactattggttcttaagttttttatctccagatcctaatttatgcctatgcaaaaaataaatgacgcccaagagctgtgggatgtggctttcaaaaaaa

SEQ ID NO: 2669 - DNA, 3033 bp, Homo sapiens
gcgggggcgcgtcggggctggagccggagcgcgccgggcgctgggcgcagcgagcgagagcgcggcggccgcgggctccggcgagggacagacgcaccgatcgccggagggacagacacacgaccacgcggcgccaccgcccacgcctccacccaccggcgcccaagtcctccccgcgccgcctcctctgtatggcacaaactttcctcccgggacggaacacgctgcctcagggagcccgcgaccgcgccttctcctccgccggtcccatacgctgctgaaatgggttgcggattgaacaagttagagaaacgtgatgaaaaacggcctgggaatatttattcaactttgaagaggcctcaggtggaaaccaagatagatgtgtcctatgaataccgcttcctggagttcacgactctgagtgctgcggagctccctgggtcctcagcagtgaggctggcctccctgcgtgacctgcccgcccagctcctggagctgtaccagcagggcttctcgctggcggccctgcaccccttcgtgcagcccacccatgagcgggagaagacgcccctggagcacatctttagagccatcctgatcaagaaaaccgacagatctcagaaaactgatcttcacaatgaaggctacatcttggaattagattgctgttcctccttagaccacccgacagaccagaaactcatcccagagttcattaagaagatccaggaggctgcaagccagggcctgaaattcgttggtgttatacctcagtaccattcctctgtgaactcggcaggcagcagtgctccggtgtctactgccaacagcaccgaggatgccagagatgcaaaaaacgcacgtggggatcacgcgtcactggagaatgagaaaccggggactggggatgtgtgcagtgctccggctgggagaaaccaaagcccagagcccagctcaggccccagaggggaggtgcccctcgccaagcagcccagctcaccctccggagagggagatggtggagaactttcaccacagggggtgagcaagacactggatggaccggagagcaaccccttggaggtgcatgaagagccactctcagggaaaatggagatcttcacccttttcaacaaaccgaagagccatcagaagtgccggcaatactaccctgtcaccattcctctccatgtctccaagaatggccagacagtgagcggtttggacgccaactggttagagcacatgagcgaccacttccggaaaggaggcatgctggtgaacgcagtcttctaccttggaatagtgaatgattccttacatggcttgacagatggagtattcatctttgaagctgtttccacagaagatagcaaaaccatacagggctatgatgctattgtggttgaacaatggacagtcctggaaggtgtcgaagtgcagacagactacgtgcccctgctgaactcgctggcggcctatggctggcagctcacctgtgtgctaccaactcccgtcgtcaagactaccagcgaggggagtgtatccaccaagcagattgtctttcttcagagaccttgtctacctcagaaaatcaagaagaaggaatcgaagtttcagtggcgattctccagagaagaaatgcacaacaggcagatgaggaaatcaaaaggtaaactcagtgccagagacaaacaacaagcagaagaaaatgagaagaacttagaagaccagtcttccaaagctggagacatgggaaactgtgtttcaggacagcagcaggagggtggagtctccgaggagatgaagggccctgtccaagaggacaagggagaacagctgtcccctggtggcctgctgtgtggggtgggtgtggagggtgaggctgtgcagaatggtcctgccagccacagcagggccctggtggggatttgcactgggcactccaatcctggagaggatgccagggacggggatgctgaggaagtcagagagcttggtacggttgaagaaaactgagtcttgggcaatttgtgctaaaactaggtgagttgccaaacccaaggcatcttaccaacagctggtttgggggctggtttccctggtgttgtgtgttacctaccctttggcttggcttgacctctccttgtgagctcacctgagccctcccagggccaggttcctgacagtgttggtttttgcacatccactggaaaggtgtcattaatgacccagtgttagaatgcaagaggtcaggttattctagccctcatggctgaaggcccagtcctggctccaccactcctccagccagagggtctggaccatccagtgcctgtcctcgccacagggcctccagggagcattcgggtcaaatccatggacaccctgggctacaaaccaaggctgctgttcatcccacatcgtgtggggcagtgtccatcccctgcagctacttggtgacttaacaactccaggagccctgtcagctgccctcctccacctaaaccccttcgactcttctgctttgacaaagaaaatgacattggggaggggaggtgctccgcctcccagcttttctcaaaatagtcctatagatactggtaatctggaaatgaagaagtaattctgtctctgcacctacttttgcagaatgttcaaggaagtattctgtgttagtattaatgccaaaaagttgtttttaaaggttttgtactcagcacatcatacaaaccacattacttctgtcacttcagggcatcgggactggctggcgcccttgttatgtgctattttaatcagtgtaacattggtcaagttgttacccatgtatgctgtgtttatcatgtgtatatcgtccagaaagtattaaggctttaggtagatgcaactggcgaaccttggagagggaatgctgattgtcttgaccaaacccacagcctgtctcttctcttgtttagttacttacggcaataaatcatctatgagttagtgcaccgtgaaaaaaaaaaaaaaaaaaaaaaaaaaaaaaaa

SEQ ID NO: 2670 - DNA, 5462 bp, Homo sapiens
gaaccggtagtccgcggtggcgcggtccgcccctcacctggccagcggcgggcgctgaggggcccaatgggagccgcggcctggccgccccgccccgcgcctccggacgtctgtgccgggacaaggccgccgctggtgccgggtccttgaggagagcgcctcccgtccgaggccagccgcctctgtcagccgtccgcgcgggccgggtctgaagcgccgccgggacggcgaagagccgcggccgccgcggagaaggaggcagcgcaggaggccggagcggccgccgcgcccgagcacatggcgtccatcttactgaggagctgccgcggccgggcgcccgcccgcctcccgccgccgcctcggtacaccgtcccgcggggtagtccaggggatcctgctcatctcagctgtgccagcaccctggggttgaggaactgcctgaatgttccatttggctgctgcactcccatccaccctgtgtacacatcctccagaggcgatcacctcggctgttgggctctgaggcccgagtgccttcgcatagtgtcgagagcgccatggacctctacctctgtgggttttgtggctgtgggacctcagtgccttcctgtgcgtggctggcactcttcgcgccctgttcgcgatgactcggtagtagagaagtccctcaagtccttgaaggacaagaacaagaagctggaggaaggcggcccggtgtacagcccccccgcagaggtggtggtgaagaagtccctggggcagcgggtgctggacgagctgaagcactactaccatggcttccgcctgctatggatcgacaccaagatcgcggcacgcatgctctggcgcatcctcaacggccacagcctgacccgccgggagcgcaggcagtttctccggatctgcgctgacctcttccgcctggtgccgttccttgtgttcgtggtggtgccgttcatggagtttctgctgcctgttgctgtgaagctcttccccaacatgttgccatccacatttgagactcagtcactcaaggaggagaggctgaagaaggagcttcgggtcaagctggagctggccaagttcctccaggacaccatcgaggagatggccttgaagaacaaggcagccaagggcagcgccaccaaagacttctctgtgtttttccagaagatccgggaaacaggggagaggcccagcaatgaggaaatcatgcgtttttccaaattatttgaggatgagctgaccctggacaacctgacacggccgcagctggtggccctgtgcaagctgctggagctacagtccatcggcaccaacaacttcctgcgcttccagcttaccatgcggctgcgctccataaaggcagacgacaagctgattgctgaggaaggggtggacagcctgaatgtcaaggagctgcaggcagcgtgtcgggcacgaggcatgcgggccctgggcgtcacggaagaccgcctgaggggtcagctgaagcagtggctggacctgcacctgcatcaggagatccccacatcgctgctcatcctgtcccgggccatgtacctcccggacaccctctctccagccgaccagctcaagtccacactgcagaccctcccagagattgtggcaaaggaagcacaggtgaaagtggccgaggtggagggcgagcaggtggacaacaaggccaagctggaggccacgctgcaggaggaggcggccatccagcaggagcaccgtgagaaggagctgcagaagcgctcggaggtggcgaaggattttgagcccgaacgtgtggtagctgctccccaaaggccggggaccgagccacagccagaaatgcctgacacagtcctgcagtcagagaccttgaaggacactgccccggtgctggagggcttgaaggaggaagagatcacgaaggaggaaatcgacatcctcagcgatgcctgctctaagctgcaggagcagaagaagtcactcaccaaggagaaggaggagctggagctgctgaaggaggatgtgcaggactacagcgaggacttgcaggagatcaagaaggaactttcaaagactggtgaagaaaagtacgtggaagaatctaaagccagcaagagattgacaaaaagggtgcagcaaatgatcgggcagatcgatggcttgatctcgcagctggagatggaccagcaggctggcaagctggccccggccaacggcatgcccacgggggagaacgtcatcagtgtcgctgagctcatcaacgccatgaagcaagtcaagcacattcccgaaagcaagctcaccagcctggccgcagcactggatgaaaacaaggatggcaaggtcaacatcgacgacctcgtcaaggtgattgagctggtggacaaagaagatgttcacatctccaccagccaggtggctgagattgtagcaacactggaaaaagaggagaaggtggaggagaaggagaaggccaaagagaaggcagagaaggaggtcgcagaggtgaagagctagaaccactggcctgggcacctgtcctcctgctgtgccgtcaccctggcaagggccgtgagggcgattgctttgtggtgattctcagtggctcatctaatattttggctggaataaatcagagacttccataatcaagtaaattttaattttcatcattccacggagattcagtctgtctggaatcccggaacccctccacagaatcgtgtctggatccacactgtggtgtggctgccacggcctcctggctccagaggcagctgggctgggccaaggcaggaaggcgcccccatgtgtgtggcctcagtctcagcatctgactgtgctgccctgtccccagggaagagaatgaggaccacgtggactccgcccacacagagctggctgctgtgcccaccctcaggggcgtcaggagacacagcctggcctcctcagggctgaagatgcctccattcgcctgtggaccttgatttctagatttcagtgtcaatagacctgtcttcctgcacactttcagttggatgtgggtcattgtggagacagaggtgtctgccatctctgtggcctctggagagtgacgtctccctgctgggagtgctggttctcacgtgcggtttcccttgtgtatcggagctctttctcggctttctatttcccccagttctttaagcagtcaattggcacagagtttcccacgggggctgcagtggattcactgtgtcagggatgagcctggcttgggggttggtggggctctgaagcgcatttggggttctttgtagcttctaatgtgaggtttgagtccagtgcgcccacagcagcatgcccttctcaccccttgcagtgttgcaggctcaggcccctgggctccttcagcaagcaggctagtcaatgaggcatgaggatccggcacagggcatcccctggggcttcaagggcaatacccccgtgcttagggtttgccctgtgccctctgggtggggtggcctccccgcactcggcagcatggccaggctggccagggcgtgggcaggtggtgtcctgtggcacctccatcctcctgcccagccggctgtgtcacactcatctttttaaggtcaggttggttcctggcaaaaatgtacctccaggggcctccaagcataggatttggaagacaggaacggcacaggcgtccaggaaagcagctgcactcagacaatgccttctccattacttgaagcttctttctgttcagccattaaagaaacttgacaaaataggaacaggagatatttctcaattgtaaacctttgtgcagggacagttggcttccagaggctttcagctttcagttatttgagaagtttgttttagatccttaactaatatttatgaattctctcaccctgtgtaagtagcctggtgttcgtttgtccaagtgtacttacccttgagaacaagtcttgcagttgccaggtgtgtgcagacgcctctcctgtgagcggcatcgcgggcccagtcagctgccccggctctcatcctcgtcctcactgccttggctgagcactgttgacgtgaacagccactgcaacaggcagcccatcccactgtcccctctgccctggactccgcatggcctccaaaagccagcttgccctccgggtgctgcaggggctttgcaggtggggaaggctctggtgggtgcctttggtggcttccgtgacatcagccgtgctctgatgcaggcttgctccctcgtcattctccctcgtcattctccctcatcgttctgtgtgcatttttctctatgtcctgacctttcttcttgcacctaaaagtggtgtctgggtgcaaatgtaagcagtggtggatccagaaatatgagctttgtgtaataagcttcttaaaacagtcctttcttacacctgcccagggccagaccctcggtcttggcctttttcaggagctaggatatctgcgcctggtgaaaatgaaacgaattcctgatttaggaattcagtgtttcctcctcactccagctaagcactcacttttttttttttttttttttttttttgatacagagtctcgctctgtcacccaggctggagtgcagtggtgcgatctcggctcactgcaagctccacctcccgggttcaagcgattcttctgcctcagcctcctgagtaattgggattacaggcatgcgccaccatgcccagctaatttttttttttttttttgagacagagtcttgctctgtctcccaggctggagtgcaatggcgtgatctcggctcactgccagctccgcttcctgggttcacgccattctcctgcctcagcctcccgagtagccaggactacaagcacccgccaccacacctggctaatttttttgtatttttattagagacagtgttttaccgtgttagccaggatggtctcgatctcctgacttcgtgatctactcacctcggcctcccaaagtgctgggattacgggcaagtttttattagagatggggtttcatcatgttggtcaggctggtcttcaactcctgacctcaggtgatccacccgcctcagcctcccaaagtgctgggattacaggcatgagccaccgcgcccggcctgaactctcagttctaacgcagggattcaggaattgggctttcagactccttctgcagtgtcacagtccagactttttttaaatgaaggacaccccgcagtggctcacagtgggtcccagggctagcaggagcgtgctggggagccggctctgtctttgttcgcagtgggtcccggtgctggcaggagtgtgctggtgagccggctctgtctttgtaaatccttcaggggtcctacggctgactccaccggacagcccgtcctgggccgtgttaagcaccttttgtagaaatcgtatttttattaaaacatcaaatctgtgttcctgtaa

SEQ ID NO: 2671 - DNA, 3228 bp, Homo sapiens; identical to SEQ ID NO: 99

SEQ ID NO: 2672 - DNA, 2918 bp, Homo sapiens; identical to SEQ ID NO: 2093

SEQ ID NO: 2673 - DNA, 2939 bp, Homo sapiens
cacgtgtcttagggtagcgcgcgcctgtctctcttcgggtctcgggcccttgggcgcagcggggcgcgcgccatggcgaaggcgaagaaggtcggggcgcgaaggaaggcctccggggcgccggcgggagcgcgagggggcccggcgaaggccaactccaatccgttcgaggtgaaagttaacaggcagaagttccagatcctgggccggaagacgcgccacgacgtgggactgcccggggtgtctcgcgcacgggccctcaggaagcgtacacagactttactaaaagagtacaaagaaagggataaatccaatgtattcagagataaacgcttcggagaatacaacagcaacatgagccccgaggagaagatgatgaagaggtttgctctggaacagcagcgacatcatgagaaaaaaagcatctacaatctaaatgaagatgaagaattgactcattatggccagtctttggcagacatcgagaagcataatgacattgtggacagtgacagcgatgctgaggatcgaggaacgttgtctgctgagctgactgctgcccactttggaggaggcggtgggctccttcacaagaagactcaacaggaaggcgaggagcgggagaaaccgaagtcccggaaagagctgattgaagagctcattgccaagtcaaaacaagagaagagggagagacaagctcaacgagaagatgccctcgagctcacggagaagctagaccaagactggaaagaaattcagactctcctgtcccacaaaactcccaagtcagagaacagagacaaaaaggaaaaacccaagcccgatgcatatgacatgatggttcgcgagcttggctttgaaatgaaggcgcagccctctaacaggatgaagacggaggcagaattggcaaaggaagagcaggagcacctcaggaagctggaggctgagagacttcgaagaatgcttggaaaggatgaggatgaaaatgttaagaaaccaaaacatatgtcagcagatgatctgaatgatggcttcgtgctagataaagatgacaggcgtttgctttcctacaaagatggaaagatgaatgtcgaggaagatgtccaggaagagcaaagcaaggaagccagtgaccctgagagcaacgaggaagaaggtgacagttcaggcggggaggacacagaggagagcgacagcccagatagccacttggacctggaatccaacgtggagagtgaggaagaaaacgagaagccagcaaaagagcagaggcagactcctgggaaagggttgataagcggcaaggaaagagctggaaaagctaccagagacgagctgccctacacgttcgcagcccctgaatcctatgaggaactgagatctctgttgttaggaagatcgatggaagagcagcttttggtggtggagagaattcagaagtgcaaccacccgagtctcgcagaaggaaacaaagcaaaattagaaaaactgtttggctttcttttggaatacgttggcgatttggctacagatgacccaccagacctcacagtcattgataagttggttgtgcacttatatcatctttgccagatgtttcctgaatctgcaagtgacgctatcaaatttgttctccgagatgcgatgcatgagatggaagaaatgattgagaccaaaggccgggcggcattgccagggttggatgtgctcatttatttgaaaatcactgggctgctatttccaacttccgacttctggcacccagtggtgacccctgccctcgtgtgcctcagtcagctgctcaccaagtgccccatcctgtccctccaggacgtggtgaagggcctgttcgtgtgctgcctgttcctggagtatgtggctttgtcccagaggtttatacctgagcttattaattttcttcttgggattctttacatagcaactccaaacaaagcaagccaaggttccactctggtgcaccctttcagagcgcttgggaagaactcggaactgctcgtggtgtctgctagagaggatgtggccacgtggcagcagagcagcctctccctccgctgggcgagtagactgagggccccaacttcgacagaggccaatcacatccgactgtcctgcctggctgtgggcctggccctgctgaagcgctgcgtgctcatgtacgggtccctgccatccttccacgccatcatggggcctctccaagccctcctcacggatcacctggcggactgcagccacccgcaggagctccaggagctgtgtcagagcacactgaccgaaatggaaagccagaagcagctctgccggccgctgacctgtgagaagagcaagcctgtcccactgaagcttttcacaccccggctggtcaaagtcctcgagtttggaagaaaacaaggcagtagtaaggaggaacaggaaaggaagaggctgatccacaaacacaagcgtgaatttaaaggggccgttcgagaaatccgcaaggacaatcagttcctggcgaggatgcaactctcagaaatcatggaacgggatgcggaaagaaagcggaaagtaaagcagctttttaacagcctggctacacaggaaggcgaatggaaggctctgaagaggaaaaagttcaaaaaataaattacattttataaataagctccccccacccgctgcctgcggttttgtttctgttaaaacgtcacctgatgaaatagaatgaatcctgaaatgcacctctgggatcgggaatggtctgtgtgttatcagctgcgactggttcactgcgtctggacaagcctcatggggactggggattctggccagtgtaatttctgtcaaccacggacgtttgccttcatgtgtagaatttactgttgttatgcaaattatattttcaattataaatgaaaaaaaaaaaaaaaaaaaaaaaa

SEQ ID NO: 2674 - DNA, 2213 bp, Homo sapiens; identical to SEQ ID NO: 1456

SEQ ID NO: 2675 - DNA, 1534 bp, Homo sapiens
tattgtcagagtcctcttgtttggccttctaggaaggctgtgggacccagctttcttcaaccagtccaggtggaggcctctgccttgaacgtttccaagtgaggtaaaacccgcaggcccagaggcctctctacttcctgtgtggggttcagaaaccctcctcccctcccagcctcaggtgcctgcttcagaaaatgaagtagtaagtctgctggcctccgccatcttagtaaagtaacagtcccatgaaacaaagatgcagtcgggcactcactggagagttctgggcctctgcctcttatcagttggcgtttgggggcaagatggtaatgaagaaatgggtggtattacacagacaccatataaagtctccatctctggaaccacagtaatattgacatgccctcagtatcctggatctgaaatactatggcaacacaatgataaaaacataggcggtgatgaggatgataaaaacataggcagtgatgaggatcacctgtcactgaaggaattttcagaattggagcaaagtggttattatgtctgctaccccagaggaagcaaaccagaagatgcgaacttttatctctacctgagggcaagagtgtgtgagaactgcatggagatggatgtgatgtcggtggccacaattgtcatagtggacatctgcatcactgggggcttgctgctgctggtttactactggagcaagaatagaaaggccaaggccaagcctgtgacacgaggagcgggtgctggcggcaggcaaaggggacaaaacaaggagaggccaccacctgttcccaacccagactatgagcccatccggaaaggccagcgggacctgtattctggcctgaatcagagacgcatctgaccctctggagaacactgcctcccgctggcccaggtctcctctccagtccccctgcgactccctgtttcctgggctagtcttggaccccacgagagagaatcgttcctcagcctcatggtgaactcgcgccctccagcctgatcccccgctccctcctccctgccttctctgctggtacccagtcctaaaatattgctgcttcctcttcctttgaagcatcatcagtagtcacaccctcacagctggcctgccctcttgccaggatatttatttgtgctattcactcccttccctttggatgtaacttctccgttcagttccctccttttcttgcatgtaagttgtcccccatcccaaagtattccatctacttttctatcgccgtccccttttgcagccctctctggggatggactgggtaaatgttgacagaggccctgccccgttcacagatcctggccctgagccagccctgtgctcctccctcccccaacactccctaccaaccccctaatcccctactccctccaccccccctccactgtaggccactggatggtcatttgcatctccgtaaatgtgctctgctcctcagctgagagagaaaaaaataaactgtatttggctgcaagaaaaaaaaaaaaaaaaaaaaaa

SEQ ID NO: 2676 - DNA, 1697 bp, Homo sapiens
gaggcgtaagccaggcgtgttaaagccggtcggaactgctccggagggcacgggctccgtaggcaccaactgcaaggacccctccccctgcgggcgctcccatggcacagttcgcgttcgagagtgacctgcactcgctgcttcagctggatgcacccatccccaatgcaccccctgcgcgctggcagcgcaaagccaaggaagccgcaggcccggccccctcacccatgcgggccgccaaccgatcccacagcgccggcaggactccgggccgaactcctggcaaatccagttccaaggttcagaccactcctagcaaacctggcggtgaccgctatatcccccatcgcagtgctgcccagatggaggtggccagcttcctcctgagcaaggagaaccagcctgaaaacagccagacgcccaccaagaaggaacatcagaaagcctgggctttgaacctgaacggttttgatgtagaggaagccaagatccttcggctcagtggaaaaccacaaaatgcgccagagggttatcagaacagactgaaagtactctacagccaaaaggccactcctggctccagccggaagacctgccgttacattccttccctgccagaccgtatcctggatgcgcctgaaatccgaaatgactattacctgaaccttgtggattggagttctgggaatgtactggccgtggcactggacaacagtgtgtacctgtggagtgcaagctctggtgacatcctgcagcttttgcaaatggagcagcctggggaatatatatcctctgtggcctggatcaaagagggcaactacttggctgtgggcaccagcagtgctgaggtgcagctatgggatgtgcagcagcagaaacggcttcgaaatatgaccagtcactctgcccgagtgggctccctaagctggaacagctatatcctgtccagtggttcacgttctggccacatccaccaccatgatgttcgggtagcagaacaccatgtggccacactgagtggccacagccaggaagtgtgtgggctgcgctgggccccagatggacgacatttggccagtggtggtaatgataacttggtcaatgtgtggcctagtgctcctggagagggtggctgggttcctctgcagacattcacccagcatcaaggggctgtcaaggccgtagcatggtgtccctggcagtccaatgtcctggcaacaggagggggcaccagtgatcgacacattcgcatctggaatgtgtgctctggggcctgtctgagtgccgtggatgcccattcccaggtgtgctccatcctctggtctccccattacaaggagctcatctcaggccatggctttgcacagaaccagctagttatttggaagtacccaaccatggccaaggtggctgaactcaaaggtcacacatcccgggtcctgagtctgaccatgagcccagatggggccacagtggcatccgcagcagcagatgagaccctgaggctatggcgctgttttgagttggaccctgcgcggcggcgggagcgggagaaggccagtgcagccaaaagcagcctcatccaccaaggcatccgctgaagaccaacccatcacctcagttgttttttatttttctaataaagtcatgtctcccttcatgttttttttttaaaaaaaaaaaaaaaaaaaaaaaaa

SEQ ID NO: 2677 - DNA, 410 bp, Homo sapiens
aatcaatacccgagataacagcagaagcaaaaatccaccggtgcgtcagcaagcagggcactcggccattcagctccatccttccttctgagctgttctccagcaggctccggccgcagctccaggccactagagcagatagataatgtaggacagaatgaccaggcctatgatggcaaagaacatcaggatgaaaatatccagcattgtggattcctaggccgaccaagcccctggattctggtgaaccgtgagctgtgagcacggaggttgcagtcggtggagagaaatggctccccttcactccacagctcagccctggttctttcccctccccctcccaggggcctgagactgaaggatgctgcagctccaccagcagcttcctgcccccccaccaaccacggcgc

SEQ ID NO: 2678 - DNA, 3574 bp, Homo sapiens
aggggaggagaggagaacttagagaaggaaggcggcgggtgtcagggctatgagtgcttttaaggaaggtctccatagaaggttcccccagcaaagtagggaggggtactccccgagaggagtcgaggtgccggagcctgctgcctcgccgacgctgggaggagccccgtgtcccgccgcgcttgccaagggttggctgcgcgtgcggcgggagtagaggcgccttgcgcaccaggaagtgactgtttccccgccgcagcaaaccaggccatccgctggccttttagtttgccgcctcagaaaactccctactatgccaaactgtccgcggggcggggaatggaggaggcaggcggggctggagacgggacccgacggtgactgcgcaaggtcgtgtacggcccagcgtgggcctgtgccctaactcctcccactcccttactttctgtccttcccgggccctgcagaccggccaagtttagtggtagcctttcctagtgtctcctctttgttaacccttcctacagacacagtgggcagaacttgcctaaagaagaagggaatggaagggctagtggagtcttgttggggagacaaggacctgactgcctgtgggctgcattcgggacacgacacagcagtcaacccatttgcttgtttggtttagcaaggaatagtgtctggagccggtccagctgaaggaagggtgagcagagagtgcaagcaggacccttgtcggtgggtgaacattttgctccaaaagggatccttggccctgcgcaggtggatttcagtgtgttctttggatggcaggccttaagagaagagtcccactgcacagcctcagatacttcatctccatggtgggtctcttctccaaaccaggactgcttccctggtatgccagaaatccaccaggatggtcacagctctttctgggcacagtatgtaagggagatttcacccgtgtgatagccacgaaatgtcagaaaggacaaaaaagtcagaagaaaccaagccatcttggaccactagatggttcctggcaggaaaggctggctgatgttgtgacaccactctggaggttgagctatgaagaacagctcaaggtgaaatttgcagctcagaagaaaattttacaaagactagagtcttacatccaaatgctcaatggagtcagtgtgacaacggctgtacccaaatctgagaggctctcttgtcttctccatcctattataccctctcctgtcatcaatggttaccgaaataagtccaccttctctgtgaaccgaggtccagatggcaatccaaagactgtggggttctacctgggaacttggagagatgggaacgttgtctgtgtgcagtctaatcatctgaaaaacatccctgagaaacacagtcaagtggcgcagtactatgaagtattccttcgacagtctccattggagccctgccttgtatttcatgaaggtggatactggcgtgagctcacagtccgcaccaatagccaagggcacacaatggctatcatcactttccatccccagaaattaagtcaggaggagctccatgttcagaaggagattgtaaaggaatttttcatcagaggtcctggagcagcctgtggcttgacctcactttacttccaggaaagtaccatgacccgttgcagccatcagcagtctccctatcagcttctgtttggggaaccctacatctttgaagaacttctgagcttgaagatccgcatctctccagatgcctttttccagattaacacagctggtgcagagatgctgtatcggactgtgggggagctgactggagtgaactctgacaccatccttcttgacatctgctgtggaactggtgtgattggcctctctctggctcagcatacatctcgggtccttgggattgaattgttggagcaggcagtggaggatgcaagatggactgcagccttcaatggcatcaccaactctgaatttcatactggtcaagcagagaagattttgccagggctgctaaagtcaaaggaagatggacagtcaattgttgctgtggtgaacccagcccgtgccggactgcattacaaggtgattcaagccattcgaaacttcagggccatccacacgctagtttttgtttcctgcaagctccatggtgaatccactaggaatgtcattgagctgtgctgtcctccagaccctgctaagaagctcttaggcgagccctttgtcctgcagcaagctgtacctgtggatttgttccctcacaccccacattgtgagctggtgctcctctttactcgataagcagcctcctagaagacagcaggctatttgttaaggctgaagtttcagaaactttcaggtttggcatattgctacattgcagaccctgggagcattacagtggaaaccaatctttggtttgtgaataggaagaatctattaggcctctggtctgaggcagattttttttttgagatagagtctcactcttgcccaggctggagtgtcgtggcgtgatctcagctcactgcaacctccgcctcccgggttcaagtgattctcgtgcctcagcttccccagtagctaggattaaaggtgcgtgccaccatgcccggctaatttttgtatttttggtagagacagggtttcaccatgttggccaggctggtctcaaactcctgacctcaagtgatccacccgcctcggcctctcaaagtgctgggattataggcgtgagccaccacaccccgccgcggctgacttaaccttagatttcagattccctttcaatcatgcccgtttgcttgggtttgaccactccccactcctggatctggactgtttcttcctgttgctgtcagccttggttctagtttatagtcttgtctcctccgtttctgcttatggtgtggacaaatgaccttttttaagcagctggtaataattttacattgactggagcctgtgcatttgctcagagatgctacaatttttagatatttctaagacttctggattcttgaggtagttaaggattaaaaccagaaacagtcgaggttttttaaaagcagggtaagccatgaagtgaatacagggtgactgagtgatcatcagatgagattaattcttttgggttttcttggttttaaggcatctcgaatgccccttgaaaatgtagttttccctggtggtgggcacctgtaatcccagctactcgggaggctgaggcaggataattgcttgaacctgggaggtggaggttgcagtgagctgaaattgtgccactgcactccagcctgggtgacagagtgagacaccatctcaaaaaaaaaaaaaaaaagaaaatgtagttatccctaggagcaatagcaccaattaactctcacccgtggaggaagaattggttattggagagaccctaagggaaaggagattttcagagagactgaatacctataattgtgctgtgtagtgtggaggcaaaaagctccaaaatctagtataacataataaactggatattgaaaactgactgtaaaaaaaaaaaaaaaaaa

SEQ ID NO: 2679 - DNA, 1288 bp, Homo sapiens
gctaaaggcggactggcagggggcagggaagctcaaagatctggggtgctgccaggaaaaagcaaattctggaagttaatggttttgagtgatttttaaatccttgctggcggagaggcccgcctctccccggtatcagcgcttcctcattctttgaatccgcggctccgcggtcttcggcgtcagaccagccggaggaagcctgtttgcaatttaagcgggctgtgaacgcccagggccggcgggggcagggccgaggcgggccattttgaataaagaggcgtgccttccaggcaggctctataagtgaccgccgcggcgagcgtgcgcgcgttgcaggtcactgtagcgggacttcttttggttttctttctctttggggcacctctggactcactccccagcatgaaggcgctgagcccggtgcgcggctgctacgaggcggtgtgctgcctgtcggaacgcagtctggccatcgcccggggccgagggaagggcccggcagctgaggagccgctgagcttgctggacgacatgaaccactgctactcccgcctgcgggaactggtacccggagtcccgagaggcactcagcttagccaggtggaaatcctacagcgcgtcatcgactacattctcgacctgcaggtagtcctggccgagccagcccctggaccccctgatggcccccaccttcccatccagacagccgagctcactccggaacttgtcatctccaacgacaaaaggagcttttgccactgactcggccgtgtcctgacacctccagaacgcaggtgctggcgcccgttctgcctgggaccccgggaacctctcctgccggaagccggacggcagggatgggccccaacttcgccctgcccacttgacttcaccaaatcccttcctggagactaaacctggtgctcaggagcgaaggactgtgaacttgtggcctgaagagccagagctagctctggccaccagctgggcgacgtcaccctgctcccaccccacccccaagttctaaggtctcttcagagcgtggaggtgtggaaggagtggctgctctccaaactatgccaaggcggcggcagagctggtcttctggtctccttggagaaaggttctgttgccctgatttatgaactctataatagagtatataggttttgtaccttttttacaggaaggtgactttctgtaacaatgcgatgtatattaaactttttataaaagttaacattttgcataataaacgatttttaaacacttgtgtatatgatga

SEQ ID NO: 2680 - DNA, 379 bp, Homo sapiens
  misc_feature (67)..(67): n is a, c, g, or t
cactgaaaacagtcctaccattttaggtaagaccaaacagagtctctaacccaaggacttgttacanctgacaacctatagtatatttgctttttctcacaaaatgaaaccaattttgccgaaagctagctgggataataggatcatcacaagttgcagtttctataactaaaattagattgaaatctcttctgacctagaacattttacttcaggcattcagcagatttcagaaagaattaccttattttaagttagtttctttgttagtttactgtgtgtctcttattcaataaacaagcagaatttgtgtcctgccctatccatgtcttaaagatgagaagttggatccactgagttagtttcattggggcggggg

SEQ ID NO: 2681 - DNA, 1816 bp, Homo sapiens
cggctgaggcgcctcgaagggcaagcgccaagggggcgcgggcgccgccggaagctggggcggggcgcccagcgggatgcggtgaagggcgagcggcgcggcggctgcgatgagtgcctctgcggccaccggggtcttcgtgctgtccctctcggccatcccggtcacctatgtcttcaaccacctggcggcccagcatgattcctggactattgtaggggttgctgccctcatcctgttcctggtagcactgctggctcgtgtcctcgtcaaaagaaaaccaccccgggacccactgttctatgtgtatgcagtttttggatttaccagcgtggtgaacctcatcataggactggagcaagatggaatcattgacgggttcatgacacactacttgagagagggtgaaccgtatctgaacaccgcatatgggcacatgatctgctactgggatggctctgctcattatctgatgtacctggtgatggtggcagccatagcatgggaggaaacttatagaaccattggcctatattgggttggatctattattatgagtgttgttgtttttgtgccaggaaacattgtagggaagtatggaacacgaatttgccctgcttttttcttaagcataccatatacttgtcttcctgtctgggctggtttcagaatctataatcagccatcagaaaattataattacccctcaaaggttattcaagaagcccaagcgaaagacctgctgagaagaccatttgatttaatgttggttgtgtgtctcctcctggcaactggattttgcctgttcagaggtttgatgctggcatatatgttctattctgttccttactttgtgactgcactgtatggcttagtggttcctggatgttcctggatgcctgacatcacattgatacatgctggaggtctggctcaggctcagttttctcacattggtgcatctcttcatgctagaactgcttatgtctacagagtccctgaagaagcaaaaatcctttttttagcattaaacatagcatatggagttcttcctcagctcttggcctatcgttgtatctacaaaccagagttcttcataaaaacaaaggcagaagaaaaagtggaataaaaatattacttcatgttcctcctttctaaattactaacttttgttatactggtactgatattttgtcccatttcactctcttctcatacgtgagtacttaagaatatgtacattcttgctctgcactgtatgtgtgagctatatggtattgtgtaaattttttttgaaggaaaatggaaattcttgagaaacagtttgtttaaagaaatatattcaaaatcatttgtgaataaacttgatcatccatctcaatattgtttgacatataaaataattataagtgtaaaaaattacaatttagtgccaacagtagtgagcatgaaatgaaactattcaaaagagaatatggcctgtgcatattaaaaaattcaaaacagtgaatgcagactggaggagtaacttttgcaaataagatgaatatgcttcattattaaactcaatataaaaggcaaatcatcagaatatttttaaatgttgtttgaaaaatgttttcccaaggaaagtttattatttgctgctgtttcaagaaaattacttttactaaatttttttgtgtgaatttaaacagctaaatagggatcagtaactttatctctatccttaatgaacatttgttttattggtggctggaaatatttctattgtatttctgtgtatatttttaataaaattatttttggcctctta

SEQ ID NO: 2682 - DNA, 1278 bp, Homo sapiens; identical to SEQ ID NO: 2612

SEQ ID NO: 2683 - DNA, 5732 bp, Homo sapiens
ttgcgggaaagagccaaaccctggcgttggggggcccgggcggggagcccctcccgcggtccacagcgacgcctgcccagccctcctccccttccggctccggcacggggccccgaggcgttcggaggccaggcgggtttctgtcaggcccggggaggaggggcgggcggggcggccgctgcctccccgggacgggccgtaccacgcggacggggaggacggggccaggggactgcagggcggctgcaccgcccgggggcggggtgcggagcgggccggcgggctccccggggcggggcgggagggcggggcgtggggcggacggaaccaccggggcggggtgggaggtaacgggacgggcgcgaccatggcgcggtgagggagcgggggtggggatcggtccgggggaggcctgaggccgctggcttgtgcgctgtctccgccgcccccctctttcgccgccgccgccgccgccccgggcatgtcgtccaactgcaccagcaccacggcggtggcggtggcgccgctcagcgccagcaagaccaagaccaagaagaagcatttcgtgtgccagaaagtgaagctattccgggccagcgagccgatcctcagcgtcctgatgtggggggtgaaccacacgatcaatgagctgagcaatgttcctgttcctgtcatgctaatgccagatgacttcaaagcctacagcaagatcaaggtggacaatcatctcttcaataaggagaacctgcccagccgctttaagtttaaggagtattgccccatggtgttccgaaaccttcgggagaggtttggaattgatgatcaggattaccagaattcagtgacgcgcagcgcccccatcaacagtgacagccagggtcggtgtggcacgcgtttcctcaccacctacgaccggcgctttgtcatcaagactgtgtccagcgaggacgtggcggagatgcacaacatcttaaagaaataccaccagtttatagtggagtgtcatggcaacacgcttttgccacagttcctgggcatgtaccgcctgaccgtggatggtgtggaaacctacatggtggttaccaggaacgtgttcagccatcggctcactgtgcatcgcaagtatgacctcaagggttctacggttgccagagaagcgagcgacaaggagaaggccaaggacttgccaacattcaaagacaatgacttcctcaatgaagggcagaagctgcatgtgggagaggagagtaaaaagaacttcctggagaaactgaagcgggacgttgagttcttggcacagctgaagatcatggactacagcctgctggtgggcatccacgacgtggaccgggcagagcaggaggagatggaggtggaggagcgggcagaggacgaggagtgtgagaatgatggggtgggtggcaacctactctgctcctatggcacacctccggacagccctggcaacctcctcagctttcctcggttctttggtcctggggaattcgacccctctgttgacgtctatgccatgaaaagccatgaaagttcccccaagaaggaggtgtatttcatggccatcattgatatcctcacgccatacgatacaaagaagaaagctgcacatgctgccaaaacggtgaaacacggggcaggggccgagatctcgactgtgaaccctgagcagtactccaaacgcttcaacgagtttatgtccaacatcctgacgtagttctcttctaccttcagccagagccagagagctggatatggggtcggggatcgggagttagggagaagggtgtatttgggctagatgggagggtgggagcagagtcgggtttgggagggctttagcaatgagactgcagcctgtgacaccgaaagagactttagctgaagaggagggggatgtgctgtgtgtgcacctgctcacaggatgtaaccccaccttctgcttacccttgattttttctccccatttgacacccaggttaaaaaggggttccctttttggtaccttgtaaccttttaagataccttggggctagagatgacttcgtgggtttatttgggttttgtttctgaaatttcattgctccaggtttgctatttataatcatatttcatcagcctacccaccctccccatctttgctgagctctcagttcccttcaattaaagagatacccggtagacccagcacaagggtccttccagaaccaagtgctatggatgccagattggagaggtcagacacctcgccctgctgcatttgctcttgtctggattaactttgtaatttatggagtattgtgcacaacttcctccacctttcccttggattcaagtgaaaactgttgcattattcctccatcctgtctggaatacaccaggtcaacaccagagatctcagatcagaatcagagatctcagaggggaataagttcatcctcatgggatggtgaggggcaggaaagcggctgggctcttggacacctggttctcagagaaccctgtgatgatcacccaagccccaggctgtcttagcccctggagttcagaagtcctctctgtaaagcctgcctcccactaggtcaagaggaactagagtacctttggatttatcaggaccctcatgtttaaatggttatttccctttgggaaaacttcagaaactgatgtatcaaatgaggccctgtgccctcgatctatttccttcttccttctgacctcctcccaggcactcttacttctagccgaactcttagctctgggcagatctccaagcgcctggagtgctttttagcagagacacctcgttaagctccgggatgaccttgtaggagatctgtctccctgtgcctggagagttacagccagcaaggtgcccccatcttagagtgtggtgtccaaacgtgaggtggcttcctagttacatgaggatgtgatccaggaaatccagtttggaggcttgatgtgggttttgacctggcctcagccttggggctgtttttccttgttgccccgctctagacttttagcagatctgcagcccacaggcttttttggaaggagtggcttcctgcaggtgttccacctgccttcggagcctgccacccaggccctcagaactgagccacaggctgctctggccaggagagaaacagctctgttgttctgcattgggggaggtacattcctgcatcttctcaccccctcaaccaggaactggggatttgggatgagatatggtcagacttgtagataaccccaaagatgtgaagatcgcttgtgaaaccattttgaatgaatagattggtttcctgtggctccctccaaacctggccaagcccagcttccgaagcaggaaccagcactgtctctgtgcctgactcacagcatataggtcaggaaagaatggagacggcattcttggacttcactggggctgctggattggatgggaaaccttctggaagaggcagatgggggtcaaaccactgccttggccccaggaaggggccataggtaggtctgaacaactgccgcaagaccactacatgacttagggaacttgaaaccaactggctcatggagaaaacaaatttgacttgggaaagggattatgtaggaataatgtttggacttgatttccccacgtcataatgaagaatggaagtttggatctgctcctcgtcaggcgcagcatctctgaagcttggaaagctgtcttccagcagcctccgtggcctcgggttcctaccggcttctctgcatttggtctgctgatcatgttgccataatgtgtatggaaagtgtaacacattcttactggttaaagacgactaccaggtatctaacttgtttaacattgagtttgtgtgtgtgtgtgtatgtttgtgtgttttgtatattgtttacattttgagaggtagcattctgtttcaaatgctttttgtttttctgacagtattgttgactgggtcataacattttgagctgtggtttggtggattttcaatttttttttttaaaggtcattcgctgtgctatcttcaaaaccttgagtttggcccccaatttttggcattcaaatgtttaaaagctatttatcttggtttatacaagtttcctttctcttctttttgtcatggtattctatttggtctgcagtttgaatgtagagaaagtggactgatcccccaagcgttgtctgcccccactctttcctccttgggtcccgccattcttttactgggcagtcgagggcattggaggggaagtgactgccctcagcctcactccctggggccatgaagaaaagctaaacagtctcatggcatctcagaataatgttgggtctcccaagaagaaaggtgtaagaataacgacatggctgattaggcgaggccaggatagggctaaggccaggattcctggctggcatccagtcaccccttctcccatccttccccctcttcttccacaagtccgcagccgagacactgtagtctcccagccacagtgatgagtgccctggagactccactgacctctagatgaaggcccctggccctggttcctgttaattaacctctgggtctttgagtcccccagcacaaacttctttcctgtaccctgcggcttggggtcacagggcatgccgggaagccacagctgaggggcgcagactgaagcagtgctccacctctccttctttagctcaggggttgctggtctgtggcaggcgccacgagtggcccctgtggctgttctcagtggcagtctcttaagttcccaccacaggcagctctttatcccctctccctacttgactctttctcttgcctgtgcttttggcctcaaacaggcctgctggtagcgctcagggcgtgaggctacactcctgccctgcctttcctgtcttcatggtctgccagggcataccttggggaggtggaccaaagacccaggactttttgcagtagccagtcctaccccccagttgtctttttaccaattcagggtgggagagaaaactgcagcaccccagcatgtgagttactcaggtgttgggggctagaagggacagtgcgtttaaacaacactcagagctctggccttaaacctgtggccccccaagtctaggagcctcatctcttcctggcagtcatgcgggcaggaggtcctgaaagggaaaacccattcagacaactgttccccaatctaccagccatctgcaggggtcagtgaccgtggccctctccctcctctagaatgtgccacttatgaagagtgccccatggggaaaaggagactcagctgtcccttggcagcttgtgccagtatcccagggcagaagtttccacaggagcctcttgcccttgcgcagagccactgtgagaggcggtgggagccaacacccttgggggagggggcagtactgctcggcacatcccagcatcaggtcagatcattgaaattaaaaaatgtgaattaagttcatatccaccttttggggaagcaggacaaaccaccaccccaccaagtgtgtgacttctccatatcccactgcagtttccattttttaaatgggaattttcaatcccctgtgcttgtctaacgtctgctttaaaaagtttgagaccctgttactgtttgaaaatgcatgcatgttacgatgaatctccaacctgaggaaaaaaataaaactcaaaaagctttgtgta

SEQ ID NO: 2684 - DNA, 1523 bp, Homo sapiens
tggctgagttcttcctttgacaagatggcggcaggaggcagtggcgttggtgggaagcgcagctcgaaaagcgatgccgattctggtttcctggggctgcggcccacttcggtggacccagcgctgaggcggcggcggcgaggcccaagaaataagaagcggggctggcggcggcttgctcaggagccgctggggctggaggttgaccagttcctggaagacgtgcggctacaggagcgcacgagcggtggcttgttgtcagaggccccaaatgaaaaactcttcttcgtggacactggctccaaggaaaaagggctgacaaagaagagaaccaaagtccagaagaagtcactgcttctcaagaaaccccttcgggttgacctcatcctcgagaacacatccaaagtccctgcccccaaagacgtcctcgcccaccaggtccccaacgccaagaagctcaggcggaaggagcagctatgggagaagctggccaagcagggcgagctgccccgggaggtgcgcagggcccaggcccggctcctcaacccttctgcaacaagggccaagcccgggccccaggacaccgtagagcggcccttctacgacctctgggcctcagacaaccccctggacaggccgttggttggccaggatgagtttttcctggagcagaccaagaagaaaggagtgaagcggccagcacgcctgcacaccaagccgtcccaggcacccgccgtggaggtggcgcctgccggagcttcctacaatccatcctttgaagaccaccagaccctgctctcagcggcccacgaggtggagttgcagcggcagaaggaggcggagaagctggagcggcagctggccctgcccgccacggagcaggccgccacccaggagtccacattccaggagctgtgcgaggggctgctggaggagtcggatggtgagggggagccaggccagggcgaggggccggaggctggggatgccgaggtctgtcccacgcccgcccgcctggccaccacagagaagaagacggagcagcagcggcggcgggagaaggctgtgcacaggctgcgggtacagcaggccgcgttgcgggccgcccggctccggcaccaggagctgttccggctgcgcgggatcaaggcccaggtggccctgaggctggcggagctggcgcggcggcagaggcggcggcaggcgcggcgggaggctgaggctgacaagccccgaaggctggggcggctcaagtaccaggcacctgacatcgacgtgcagctgagctcggagctgacagactcgctcaggaccctgaagcccgagggcaacatccttcgagaccggttcaagagcttccagaggaggaatatgatcgagcctcgagagagagccaagttcaaacgcaagtacaaggtgaagctggtggagaagcgggcgttccgtgagatccagttgtagctgccatcagatgccggagactcgcccttcaataaaaaatctcttctagctgatcagtggga

SEQ ID NO: 2685 - DNA, 2657 bp, Homo sapiens
aaagggccagcggggcacgtggctcgggacgcagttcgctgccgcccggcagtagctctcaggttaggcgggtcccgctccgcttccgccgtcgctgccgcgccgccccgggcccgacaggccgggtccagggactgcaacccagcgagggacgcgggcagccatggccgaagcggcgcctgcccgggaccccgagacagacaagcacacagaggaccagagtccttcgacacccttgccccagccagctgctgagaagaactcgtacctctactccacggaaatcacactgtggacggtggtggccgccattcaggccttggagaagaaggtggattcctgcctgacccgcttgctgactctggaggggcgcacggggacagccgagaagaagctggccgactgcgagaagacagctgtggagttcgggaaccagctggagggcaagtgggccgtgctggggaccttgctgcaggagtacgggctgctgcagaggcggctggagaatgtggagaacttgctgcgcaacaggaacttctggatcttgcggctgcccccgggcagcaagggggaggcccccaaggtgcccgtgaccttcgatgatgtggccgtgtatttctctgagctggagtggggcaagctggaggactggcagaaggagctctacaagcacgtgatgaggggcaactacgagacgctggtctccctggattatgcaatctccaaaccagacatcctcacccggatagagaggggagaggagccttgtcttgaccggtggggccaggagaaggggaatgaagtagaggtgggacgtccaaggatgatgggcactggcctccctccgtatccagagcacctcaccagcccacttagccctgcccaggaggagctgaaagaagggcaggcccccaagcagcagcaggactcagaggcgagagtggccccagccgggccagaagcaggactggcattgcggactgacctccagggagaggcccagatctgatctgcagagatctcccttccggctatcgtggctgctgttcaggtggtggagaagaagatggaaccccaggctgcctggctacagagcctggagggatgcatgtggacagccaagaagaagctggctgactgcgagaaggtggctgtggagttcgggaaccagctggaggccaggccaccaccaagccagatctggcaccagtggagaaaggagacaggcaggcaactgcagcctgcccagtgcggagaggggccagagcccgggcactgggccctggttaatggtggagccagcctggtgtgtggcagccaggtcgggctggtgtcttcagagtggctgtgtcagaagggcctcgtgtatgacagaaacgcaggccagctggaacgtccccaggcgttctgtcctggatcaagcaagaggaaggggcaagtgggaggagccagcagggcccacaggagaccactgtggcacacctgtgctcaggcagcatggtgctgggcgctgcaggggctcattaatgcatgagacacagattccactcaggagagagaagacgaacacagacacagtacacgagacctgtctgggccgcagagaggagtctggaggtagggtccaagggccacgagccagtttgggctgctggaggggggcctggcaaggagggctctcggggaagcacctgtgggggtctgcttcctgaccccagggagctagaggcctccctccctccaggccccccgagccaggctgagccagccgctaggggcacggagcagtgcccaccttgcgcccagtgtggccagagcttcggccagaaggagctcagtgcgccgcaccagcgcgtgcatcgtggcccccggcctttcgctggtgctcagtgtcccaagagcttcacgcagcggaccacccccgccagccaccgtcgggcgcacgtggccgagtgcacctacacccgcgcccaatgcggcaagaccttcctccagcagtcgacgctcacacccactactgcgcgcacatcagggagaagccctacgagtgcgccaagctctttggccgcctgtccacgctgctggagcaccggcacatgcacacgggtgagcggcccttccagtgcacgcaatgtggctgctgcttcagccgcctgtccacgctgctggagcaccggcacacacacatcagcgagaagcccttccagtgtgcgcagtgcgacaagcgtttcacgcgtctggccaacctgaccgtgcaccagagagtgcacttgggcgagcgctccttccagtgcgcccagtacagcaggagattcatgcagaagcccggcttcctgcgtcatctgtgtggccactcgcaggagaagcactatccttgcagcccttgtggttcccatgatcagtggtgaaatatagtgattttcacctgtgcttccattctgaagttctggaaagaagtactggatggactgaagtccaggacaacgtcccaaagaaaggcagagtccaggtaggcttggaggaccaagccctggatgagcactggagggcagaggcctcagtgtccagcactgtgccctgcacatggaaagcccctacgtttgtggaatgaatgaataataaaaatgttttcataagtgaaaaaaaaaaaaaaaaaa

SEQ ID NO: 2686 - DNA, 4539 bp, Homo sapiens
acgtcatcgccgcgcgccggcttgccaggagctggagggggaggtaggcggggcggcgcgtgacctaaggcctctctgccgcgcgcgcaggtacggggcagaagtcgcaggtacccagctgctgcccacatttctggtccagagtcccgaaccccgagcactgggatgcctggctactccgagccaaggcactgatgtttgaactggaaacttcaaaacgtttaataagagtcttcaggatgggtttgaactagacaagctagaaatttctttagaacaccagctctagcatgcatctcccacttttggctttcctggagaggagcttgaagaggtggttctgcagacagccacagtgatacttaggaaaccagaggaatggatttgacttttctgctaggattctctgttatagtttctccctgagttgtaagaggcatggaaatatacatgaaactgaagaacctgcaaggaagggaagtggaactttccatgctgagtgaaaactaaccaagtggcagttgtgactgaaaacactgaaacctaccacgtccagattcactggattgggggatagaggaacggtcacagctagggagaaagaagtgataccggaaaagaaaacctaaatgaagagaatgaggatgactgcacagtagatggccacctctacctccacagaggcaaagtcagcctcgtggtggaattatttttttctttatgatggttccaaggtaaaggaagaaggcgatccaacaagagctggcatttgttacttttatccttcccagaccctgctagaccaacaggagttgctttgtggacagattgctggagttgtccgctgtgtttctgacatttctgactctcctcctactcttgttcgtctgagaaaactgaagtttgccataaaagttgatggagattacctttgggtgctgggctgtgctgtggagctccctgatgtcagctgcaagcggtttctggatcagctagttggattctttaatttttacaatggacctgtttccctagcttatgagaactgttctcaggaagaactgagcacggagtgggacaccttcatcgagcaaattctgaaaaacaccagtgatctgcataagattttcaattccctctggaacttggaccaaactaaagtggagcccctgttgttgctgaaggcagcccgcattctgcagacctgccagcgctcgcctcacattctcgctggctgcatcctctataaaggactgattgtcagcacccaactcccgccctccctcaccgccaaggtcctgcttcaccgaacagcacctcaggagcagagactccctacgggagaggatgccccgcaggaacatggagcggcattgcccccgaatgtccagattatccctgtttttgtgaccaaagaggaagccattagtctccacgagttcccggtggaacagatgacaaggtctctagcatctccagcaggactccaggatggttcagcccagcaccatccaaagggtgggagcacatctgccctgaaagaaaacgccactggccatgtggaatccatggcctggaccaccccagatcccacatcccctgacgaagcttgtccagatggcaggaaggagaacggatgcttgtctggccatgatctggagagcatcaggcccgcaggactgcacaactctgccaggggtgaggttcttggcctcagctcctccctggggaaggaactagtctttctccaagaagaactcgacttgtctgaaatccacattccagaggctcaggaagtggaaatggcctcaggtcattttgccttcctacatgtgcctgttccagatggcagggctccttactgcaaggcatctctcagcgcctccagcagcctggaacccacgcctcctgaggacacagccatcagcagcttgcgccctccctctgctcctgagatgctgacccagcatggagcccaagagcagctcgaagaccatcctggccatagcagccaagcccccattcccagagcagaccctctccccagaaggacccgcaggcccttgttattgcctcgcttagatccaggacagagaggaaacaagcttcccacgggggaacaaggcctggatgaggatgttgatggggtctgtgaaagccacgcagcccctggtctggaatgcagttcaggctcagcaaactgtcagggtgctggcccctctgcagatggaatcagctccaggctgacaccagcagagtcctgcatggggctcgtgaggatgaatctctacactcactgcgtcaaagggctggtgctgtccctgctggctgaggagccgctgctgggagacagcgcagccatagaggaagtgtaccacagcagcctggcttcactgaatgggctggaagtccacctgaaagagacgctgcccagggatgaggcagcctccacgagcagcacctacaacttcacacattacgaccgcattcagagcttgctgatggcaaacctgccgcaggtggccaccccgcaggatcgccgcttcctccaggccgtcagcctgatgcatagcgaatttgcccagctgcccgcgctttatgaaatgactgtcagaaatgcctccacggctgtgtacgcctgttgcaaccccatccaggagacatatttccagcagctggcacctgcagcacggagctccggcttcccaaaccctcaggatggcgccttcagcctctccggcaaagcaaagcagaagctgctgaagcacggggtgaacttgctctgaactgcacccaggaggtgactgggaaggagaaaaccagcaaaggaagctctgccttttataattgaaaaggcccctctattttatttttcttgaaaacattcccttttttaggaaccaaatgatatttgagtttttgttattccttttgcagattgggatgtgttttgggggcaggggttagttcttcaggtcggcagacccagagcacttgataaagaactgtatttaatcggtagtgttggggccgggacgggcttggctccctctctgccatactgagcctgaggtatttcatatctcctgctgttccatcccagcttgaattggtgccacaagcttccaagttggcattttttctagaacctgatcgtccactagcccagagtgtgtgtgttcaacccccacaccaggtggtggtaggcggtgtgactgcacagcgaggtgccggatctgtgagcaggccgactccactcccacgccgcaggtaggtttctccagtgcgctcttgctgggaggtccggatcgttcctgcagggaagcggcagcacacggagaccacttggttgaattctgttggaactctactcaaatctaggggcgtcttctttggacccacaatgggggcaagccttaataatatggaagggagtttgggctttagagatccctttataaaagctctgggggctgagccctgagaattcagtgacaacaggaccaacctgcgctgcctttgactacaagtgggccgtgcagctggttcctctcgagcgagtgtccctaaataggagtttacaagatgtctgggggtaaaagcactgtgcttttcagtggtggctgcgtgaaagggagcgacactcagctgtgtgttcctgggcttgtgtggtacttagaacctcagttctattacgttatagtcagacatttttttgacagtatgagacagactgcaggatgaaaatatttgtcaaaatcttaactgaatgtttactggaagtacttgagattccatttgagagttgtattgttaataatttcatgtcagtgaactgatatctgatgtttatgatatggtgtctttttcttgaaacaagcttccaagggctagaaataaaatagccaaaaaatgctggagttctgagtaattaaatggcagcatttttttgtgacaaaggtaagggttaagacagtgtgtgtgtgtgtgtgtgtgtgtgtgtgtgtgtgtgtgcgcgcgcgcgcgcgcgcgtaacgtgggcgcatccctcttttccttccctgggttcagtgtggctgggtaaggaccgtctgtttgtagggctgccaggctgcagcctgctgctccagggagcaccagctgcagctgatccaatacaccaagcctgtgtctccctcttctatcacctctctccaggatctctgctgtctcttggatcccatctgcctagatggaagaggatcctatccgaagctaggataaatgttgtcttactcctctgctatgttctcccagaaaaaattgattacaagttctctgctgtggttgctgcagctccaggaagtccccgcaatgtctcacgttgtctttgaccagtggtccccagtaccaggccagcgaagacaactttataatgtcatttgtgttgtgaaaattcttccactgacccaaaatggaaccgtacaaagcctatccgtgtatatggaaaagtctcatgcacctggattaactcagaaaaagtaaagtcctgaaacttca

SEQ ID NO: 2687 - DNA, 232 bp, Homo sapiens
tttttttttgagtaaagtggggtagtttttaaacaagctgtagaactcttcattgtcagcaaagtgaagagccactgcatcaatgaaagttcaagaacctcctgtacttaaacacgatttgcaacattttttttgtatgtttagaatgctgaaatgtttttgaagttaaataaacagtattacatttaaaaaaaaaatagccaggcatggtggtgggtgtctacaatcccag

SEQ ID NO: 2688 - DNA, 8136 bp, Homo sapiens
ctgatcacctgcctttccagaccggagacgggcggcaagtttgaagtcgacacccagaggccagtttgtcccccttcccgcgcgcgggcggcccgagcctcggcggcggcggtagcggcggcggcgacgctgacacctcccaccatggacagcttcgacttagccctgctccaggaatgggacctcgagtcactgtggggtgaagacatcttaaaccagaggaatgactctctagttgtggaatttcagtcatcagccagcagatgcaggagtgtctatgaaccagatagaaatgcattacggaggaaagaacgagaaagaagaaatcaagaaactcaacaggatgatggcacgtttaattctagttactctctcttcagtgagccctacaagactaacaagggggatgaactctccaaccggatccagaacactttaggcaattatgatgaaatgaaagactttttaactgatagatccaatcagagtcatctcgttggagttcccaaacctggggttcctcagactcctgtgaacaagatcgatgaacattttgttgcagattcaagagcccagaaccagccctcgtctatctgtagcactacaacttccacaccagcagctgtccccgtgcagcagagtaagagaggcactatgggctggcagaaggctgggcacccaccctctgacggccaacagagagcaacacaacagggctctctcaggaccttgcttggagatggtgttggcagacagcagcctcgggccaaacaagtgtgcaatgtggaggtgggccttcagacccaggagaggccacctgccatggcggccaagcacagcagcagcggacactgtgttcagaactttcctccatccctagcttcaaaacccagcctggtccagcagaaaccgaccgcgtatgtgaggccaatggacggccaagatcaggcccctgatgagtctcctaagctgaagtcgtcttcggaaaccagcgtgcactgcacatcatacaggggagtccctgccagcaagccggagcctgccagagccaaggccaagctctccaagttcagcatccccaagcagggggaggagagtagatctggagaaaccaacagctgtgttgaagaaataatccgggagatgacctggcttccaccactttctgctattcaagcacctggcaaagtggaaccaaccaaatttccatttccaaataaggactctcagcttgtatcctctggacacaataatccaaagaaaggtgatgcagagccagagagtccagacaatggcacatcgaatacatcaatgctggaagatgaccttaagctaagcagtgatgaagaggagaatgaacagcaggcagctcagagaacggctctccgcgctctctctgacagcgccgtggtccagcagcccaactgcagaacctcggtgccttccagcaagggcagcagcagcagcagcagcagcggcagcagcagctcctccagcgactcagagagcagctccggatctgactcggagaccgagagcagctccagcgagagtgagggcagcaagcccccccacttctccagccccgaggctgaaccggcatcctctaacaagtggcagctggataaatggctaaacaaagttaatccccacaagcctcctattctgatccaaaatgaaagccacgggtcagagagcaatcagtactacaacccggtgaaagaggacgtccaggactgtgggaaagtccccgacgtttgccagcccagcctgagagagaaggagatcaagagcacttgcaaggaggagcaaaggccaaggacagccaacaaggcccctgggagtaaaggcgtgaagcagaagtccccgcccgcggccgtggccgtggcggtgagcgcagccgccccgccacccgcagtgccctgtgcgcccgcggagaacgcgcccgcgcctgcccggaggtccgcgggcaagaagcccaccaggcgcaccgagaggacctcagccggggacggcgccaactgccaccggcccgaggagcccgcggccgcggacgcgctggggacgagcgtggtggtccccccggagcccaccaaaaccaggccctgtggcaacaacagagcgagccaccgcaaggagctgcgctcctccgtgacctgcgagaagcgccgcacgcgggggctaagcaggatcgtccccaaatccaaggagttcattgagacagagtcgtcatcttcatcctcctcctcggactccgacctggagtccgagcaggaggagtaccctctgtccaaagcacagaccgtggctgcctctgcctcctccgggaatgatcagaggctgaaggaggccgctgccaacgggggcagtggtcctagggcccctgtaggctccatcaacgccaggaccaccagtgacatcgccaaggagctggaggagcagttctacacactggtcccctttggccggaacgaacttctctcccctctaaaggacagtgatgagatcaggtctctctgggtcaaaatcgacctgaccctcctgtccaggatcccagaacacctgccccaggagccaggggtattgagcgcccctgccaccaaggactctgagagcgcaccgcccagccacacctcggacacacctgcagaaaaggctttgccaaaatccaagaggaaacgcaagtgtgacaacgaagacgactacagggagatcaagaagtcccagggagagaaagacagctcttcaagactggccacctccaccagtaatactttgtctgcaaaccactgcaacatgaacatcaacagtgtggcaataccaataaataaaaatgaaaaaatgcttcggtcgcccatctcacccctctctgatgcatctaaacacaaatacaccagcgaggacttaacttcttccagccgacctaatggcaacagtttgtttacttcagcctcttccagcaaaaagcctaaggccgacagccagctgcagcctcacggcggagacctcacgaaagcagctcacaacaattctgaaaacattcccctccacaagtcacggccgcagacgaagccgtggtctccaggctccaacggccacagggactgcaagaggcagaaacttgtcttcgatgatatgcctcgcagtgccgattattttatgcaagaagctaaacgaatgaagcataaagcagatgcaatggtggaaaagtttggaaaggctttgaactatgctgaagcagcattgtcgtttatcgagtgtggaaatgcaatggaacaaggccccatggaatccaaatctccttatacgatgtattcagaaacagtagagctcatcaggtatgctatgagactaaaaacccactcaggccccaatgccacaccagaagacaaacaactggctgcattatgttaccgatgcctggccctcctgtactggcggatgtttcgactcaaaagggaccacgctgtaaagtattcaaaagcactaatcgactatttcaagaactcatctaaagccgcccaagccccatctccgtggggggccagtggaaagagcactggaaccccatcccccatgtctcccaacccctctcccgccagctccgtggggtctcagggcagcctctccaacgccagcgccctgtccccgtcgaccatcgtcagcatcccacagcgcatccaccagatggcggccaaccacgtcagcatcaccaacagcatcctgcacagctacgactactgggagatggccgacaacctggccaaggaaaaccgagaattcttcaacgacctggatctgctcatggggccggtcaccctgcacagcagcatggagcacctggtccagtactcccaacagggcctgcactggctgcggaacagcgcccacctgtcatagggacctcaccctggggccagagtgggctctggtctccacagatggctcaacgtttttggacactgtgctactgaaactcccagccacagcatttatcagactgcggtgaacatttcctcagcattgaacaatgatcttttgcagggcatgtgtgtttgtatgtgtgggtatataagaagccgcctgtgtatgtgtgtaagatacacagctcttcagaacacaccttctttgtctagtttccataatcccaggctagacaaagtgatcagaggtttctgactagaggaagtacacacacacacacacacacacacacacaccgtacactcacacacaatcacagacacacactttctattccattccagtgctaaaccgtgacttcttagaaaattcaaccaaaatctcatgggttagttaaccaggtgcaatacagcacaccaaaagcttgactgccagtgaagatggacctgctcttatactgttgattactttcagtattaatatactattccccaattattttttgattggtatgtattaatgggtaattgaataatgaaaataagccaggtatttttgtgccggaagtttactagattgcatgttaccaaataccctgctcttcctctaattcccttcccccatctgactctattatcaactaaatgcattccaggcaaacagatggacactcacagcccttcccagccccacctccaagtagtatgcaaatggcactgagatttagcaaaaacgcggcgtctttgaaagttaacagacactaaggtagcagtgcctgtgtgttggagctcagttaggagttgaagttttctgcacctgtgataacaagcccaccagccacatgcatttcttcttcctgccactgtgactcggtggctgtagagccacatggcatttgtcagccaatctgtttcaagtcttttctttccaccaatagctttcttacagattttcttggctaaatgaggccattacctagattgtcccttcagtaggagcctgaatccttcgcttaccaggctgagagctatttgccatgataatgctgattctctcactcctcatgcagaatgtgcacctgcagccctttgatgcgttttgatttgggggcgatttttcaggctttgattagcaggctgcttgcaatgcagaagatcacagttcctttctggggcagcagcaaccagagcctcttcctgtgtcctgtgtgtctggtatgtttacaccttgctctgagtttttctcttgttttctttttttaattaagtttacattttagtttctttgacatcttgtttacagtttttgtctgatgttttttcttttgtagtgtcttatgccctagatttagtcatcttgttaaatatatttggatatgaaatcttgacgaaaagaaaataactcctgaaaaagagggtctatcttgccacacgttaaaaacaaaaataatgtccttgtggcctcttacttgataaagttgcaccaggacggtctgagaaaggcaggcggtgtaatatgtggtgcaatccattttttcaaggtgatgacggcacaaaatacttagactagatgctgatccataaacattcactgatattcttacaggttggtttgcagtgttaacatttttgttagcctgatctgtaggtgggaagtaagatcatcataattccttagctctgagcactgattcaaaattgtataaatgactgaacaacttagatgatttgaaattaattgaaaataagaagggcttgtggaatttgcatttggctttggccttcaagcatttggaaatattaagagaatttccattttacatgtctccaactggggtgcttcttacaaccctttcactttttttttgagacgagtttcgctctgttgcccaggctggagtgcagtggcacgatctcggctcactgcatcctctgcctcctgggttcaagtgattgtcccgcctcagcctcccaagtagctgggattacaggtgtgcactaccatgcccagctaatttttgtgtttttagtagagactgggtttcaccatgttggccaggctcgtctcaaactcctgacctcaggtgatctacccgcctccacctcccaaagtgttgtgattacaggcgtgagccaccacacccagccctttcactaatttttggcagagttcacaatcccatcctatgtcagaaacttgaacctaacttaagaaattttgagtcatttttttggaggactgaggctttgttctacctactcttgaagaatcctgatgaaatattcaaacacataaagggatggccctggaggtctatcctgcatacctggagagcttctctggtcctgcccaccttgaaagttgcagactttgttgtaacatctatgtgatgagcttccctgtgaagccccatttgacaggtgggccagcagtgttttatcagcactctgatggcccacatttcccaggaaaacttcttgaaacttaccgttgtgggcagtggtcagagcgtgtagttcttatgactgtcttgtttcatctgtggagcacgtgtggagcacgttggtacagcagtttctgtggggtttggcatgggtgattttggttagtaaccatcctccaattgttgcttgtgaaagtcattcataacttgttccttttacttagttttgttgttactgctgttgttgttggtttggttggttttgagaccgggtctggctctgtagcccaagctggaatgcggtggcgcgatcatggctccctgcagcctcaaactcctgggctcaagcaatcctcctgcctcagcctcccaagcagctgggaagataggcacgtgccaccacacccggctaattttttctttattttttttgtagagatgggggtctcactatgttgcccaggctggtctcaaactcctgggctcaagcgatcctttggcctcggcctcccaaagtgcatgagccaccatgcctggcctgtttagttttgtttcaagttgaaatacctttcttgtgttttctaattagaaaagtaatatctactcattgtaaaaactcaaacagtgcagaaatgtagaaagtagaaagtgtaagtccctggttgtcccttctgcctgagacaaccactgctcacagtttgatgtatatccttccagagactctcaaatttaagcaaataatttttattaccatgtctttttatttgaagacgtacatttgcctccaaagttcaacacaagttcaactgaccatatccttccatgacctgaatagatgctatcctttatcacgatgttcaattgcctttgaaagagagtagtccaggtatattcctgatcaaaatttggcatttttgatgatactactctacacagatcagactcatgtgcagaatcgtgcctggagagagaggtttggttaagacagagatttctggaaacattcaaattgcaaatggaaacttgaaacccacaatctaatgaggaatgtactggaaaaataatctgaagagttgacaaattgtgtactagattgaacacatggaatgcaatgcaatgagactttctgcactaaaacttatcctcatatgtacaacaatgatgtgtgtattatataacagtgatgtgtacatttctgacaccccatacataatatacacagtttgtataaatgcatacatttaaaaatatatatgtacaatacagctaacataaaactgtagtacgcctgaaggatattactagtgcctaatattgagtatgagtcactgcgtgttcgcatcaacttggaagtgcagtaattgttataaaattaatcagtgcagccaacattatttatgaatcacatctttgaaactgtgcagtagcatatacatatatatttttaaataacatttttcacagttttccagagttactgttgaaatctgcatcaccaaaaaaaaaaaaaagcaagatttttttaacaatgtagacactcttcagacccagtaatctgcgtgtgatttcctatttgtagattcccaagagactttagcagtcaccagccttaatgcatgtacaggatattattgtgacttaatttatctgcagtttttaatccatgtgaaattggaatttataaacggacttggattaaacatgtctgcctttctaaggttgcaaatgttacattaaatgatttatgttgtaaaaaaaaaaaaaaaaaa

SEQ ID NO: 2689 - DNA, 3300 bp, Homo sapiens
acttctccttttgctctcagatgctgccagggtccctgaagagggaagacacgcggaaacaggcttgcacccagacacgacaccatgcatctcctcggcccctggctcctgctcctggttctagaatacttggctttctctgactcaagtaaatgggtttttgagcaccctgaaaccctctacgcctgggagggggcctgcgtctggatcccctgcacctacagagccctagatggtgacctggaaagcttcatcctgttccacaatcctgagtataacaagaacacctcgaagtttgatgggacaagactctatgaaagcacaaaggatgggaaggttccttctgagcagaaaagggtgcaattcctgggagacaagaataagaactgcacactgagtatccacccggtgcacctcaatgacagtggtcagctggggctgaggatggagtccaagactgagaaatggatggaacgaatacacctcaatgtctctgaaaggccttttccacctcatatccagctccctccagaaattcaagagtcccaggaagtcactctgacctgcttgctgaatttctcctgctatgggtatccgatccaattgcagtggctcctagagggggttccaatgaggcaggctgctgtcacctcgacctccttgaccatcaagtctgtcttcacccggagcgagctcaagttctccccacagtggagtcaccatgggaagattgtgacctgccagcttcaggatgcagatgggaagttcctctccaatgacacggtgcagctgaacgtgaagcacaccccgaagttggagatcaaggtcactcccagtgatgccatagtgagggagggggactctgtgaccatgacctgcgaggtcagcagcagcaacccggagtacacgacggtatcctggctcaaggatgggacctcgctgaagaagcagaatacattcacgctaaacctgcgcgaagtgaccaaggaccagagtgggaagtactgctgtcaggtctccaatgacgtgggcccgggaaggtcggaagaagtgttcctgcaagtgcagtatgccccggaaccttccacggttcagatcctccactcaccggctgtggagggaagtcaagtcgagtttctttgcatgtcactggccaatcctcttccaacaaattacacgtggtaccacaatgggaaagaaatgcagggaaggacagaggagaaagtccacatcccaaagatcctcccctggcacgctgggacttattcctgtgtggcagaaaacattcttggtactggacagaggggcccgggagctgagctggatgtccagtatcctcccaagaaggtgaccacagtgattcaaaaccccatgccgattcgagaaggagacacagtgaccctttcctgtaactacaattccagtaaccccagtgttacccggtatgaatggaaaccccatggcgcctgggaggagccatcgcttggggtgctgaagatccaaaacgttggctgggacaacacaaccatcgcctgcgcagcttgtaatagttggtgctcgtgggcctcccctgtcgccctgaatgtccagtatgccccccgagacgtgagggtccggaaaatcaagcccctttccgagattcactctggaaactcggtcagcctccaatgtgacttctcaagcagccaccccaaagaagtccagttcttctgggagaaaaatggcaggcttctggggaaagaaagccagctgaattttgactccatctccccagaagatgctgggagttacagctgctgggtgaacaactccataggacagacagcgtccaaggcctggacacttgaagtgctgtatgcacccaggaggctgcgtgtgtccatgagcccgggggaccaagtgatggaggggaagagtgcaaccctgacctgtgagagcgacgccaaccctcccgtctcccactacacctggtttgactggaataaccaaagcctcccctaccacagccagaagctgagattggagccggtgaaggtccagcactcgggtgcctactggtgccaggggaccaacagtgtgggcaagggccgttcgcctctcagcaccctcaccgtctactatagcccggagaccatcggcaggcgagtggctgtgggactcgggtcctgcctcgccatcctcatcctggcaatctgtgggctcaagctccagcgacgttggaagaggacacagagccagcaggggcttcaggagaattccagcggccagagcttctttgtgaggaataaaaaggttagaagggcccccctctctgaaggcccccactccctgggatgctacaatccaatgatggaagatggcattagctacaccaccctgcgctttcccgagatgaacataccacgaactggagatgcagagtcctcagagatgcagagacctcccccggactgcgatgacacggtcacttattcagcattgcacaagcgccaagtgggcgactatgagaacgtcattccagattttccagaagatgaggggattcattactcagagctgatccagtttggggtcggggagcggcctcaggcacaagaaaatgtggactatgtgatcctcaaacattgacactggatgggctgcagcagaggcactgggggcagcgggggccagggaagtccccgagtttccccagacaccgccacatggcttcctcctgcgcgcatgtgcgcacacacacacacacacgcacacacacacacacacactcactgcggagaaccttgtgcctggctcagagccagtctttttggtgagggtaaccccaaacctccaaaactcctgcccctgttctcttccactctccttgctacccagaaatccatctaaatacctgccctgacatgcacacctccccctgcccccaccacggccactggccatctccacccccagctgcttgtgtccctcctgggatctgctcgtcatcatttttccttcccttctccatctctctggccctctacccctgatctgacatccccactcacgaatattatgcccagtttctgcctctgagggaaagcccagaaaaggacagaaacgaagtagaaaggggcccagtcctggcctggcttctcctttggaagtgaggcattgcacggggagacgtacgtatcagcggccccttgactctggggactccgggtttgagatggacacactggtgtggattaacctgccagggagacagagctcacaataaaaatggctcagatgccacttcaaagaaaaaaaaaa

SEQ ID NO: 2690 - DNA, 3474 bp, Homo sapiens
gcgccagcttggagagccagccccatcggggttccccgccgccggaagcggaaatagcaccgggcgccgccacagtagctgtaactgccaccgcgatgccgaaggcgcccaagcagcagccgccggagcccgagtggatcggggacggagagagcacgagcccatcagacaaagtggtgaagaaagggaagaaggacaagaagatcaaaaaaacgttctttgaagagctggcagtagaagataaacaggctggggaagaagagaaagtgctcaaggagaaggagcagcagcagcagcaacagcaacagcagcaaaaaaaaaagcgagatacccgaaaaggcaggcggaagaaggatgtggatgatgatggagaagagaaagagctcatggagcgtcttaagaagctctcagtgccaaccagtgatgaggaggatgaagtacccgccccaaaaccccgcggagggaagaaaaccaagggtggtaatgtttttgcagccctgattcaggatcagagtgaggaagaggaggaggaagaaaaacatcctcctaagcctgccaagccggagaagaatcggatcaataaggccgtatctgaggaacagcagcctgcactcaagggcaaaaagggaaaggaagagaagtcaaaagggaaggctaagcctcaaaataaattcgctgctctggacaatgaagaggaggataaagaagaagaaattataaaggaaaaggagcctcccaaacaagggaaggagaaggccaagaaggcagagcagggttcagaggaagaaggagaaggggaagaagaggaggaggaaggaggagagtctaaggcagatgatccctatgctcatcttagcaaaaaggagaagaaaaagctgaaaaaacagatggagtatgagcgccaagtggcttcattaaaagcagccaatgcagctgaaaatgacttctccgtgtcccaggcggagatgtcctcccgccaagccatgttagaaaatgcatctgacatcaagctggagaagttcagcatctccgctcatggcaaggagctgttcgtcaatgcagacctgtacattgtagccggccgccgctacgggctggtaggacccaatggcaagggcaagaccacactcctcaagcacattgccaaccgagccctgagcatccctcccaacattgatgtgttgctgtgtgagcaggaggtggtagcagatgagacaccagcagtccaggctgttcttcgagctgacaccaagcgattgaagctgctggaagaggagcggcggcttcagggacagctggaacaaggggatgacacagctgctgagaggctagagaaggtgtatgaggaattgcgggccactggggcggcagctgcagaggccaaagcacggcggatcctggctggcctgggctttgaccctgaaatgcagaatcgacccacacagaagttctcagggggctggcgcatgcgtgtctccctggccagggcactgttcatggagcccacactgctgatgctggatgagcccaccaaccacctggacctcaacgctgtcatctggcttaataactacctccagggctggcggaagaccttgctgatcgtctcccatgaccagggcttcttggatgatgtctgcactgatatcatccacctcgatgcccagcggctccactactataggggcaattacatgaccttcaaaaagatgtaccagcagaagcagaaagaactgctgaaacagtatgagaagcaagagaaaaagctgaaggagctgaaggcaggcgggaagtccaccaagcaggcggaaaaacaaacgaaggaagccctgactcggaagcagcagaaatgccgacggaaaaaccaagatgaggaatcccaggaggcccctgagctcctgaagcgccctaaggagtacactgtgcgcttcacttttccagaccccccaccactcagccctccagtgctgggtctgcatggtgtgacattcggctaccagggacagaaaccactctttaagaacttggattttggcatcgacatggattcaaggatttgcattgtgggccctaatggtgtggggaagagtacgctactcctgctgctgactggcaagctgacaccgacccatggggaaatgagaaagaaccaccggctgaaaattggcttcttcaaccagcagtatgcagagcagctgcgcatggaggagacgcccactgagtacctgcagcggggcttcaacctgccctaccaggatgcccgcaagtgcctgggccgcttcggcctggagagtcacgcccacaccatccagatctgcaaactctctggtggtcagaaggcgcgagttgtgtttgctgagctggcctgtcgggaacctgatgtcctcatcttggacgagccaaccaataacctggacatagagtctattgatgctctaggggaggccatcaatgaatacaagggtgctgtgatcgttgtcagccatgatgcccgactcatcacagaaaccaattgccagctgtgggtggtggaggagcagagtgttagccaaatcgatggtgactttgaagactacaagcgggaggtgttggaggccctgggtgaagtcatggtcagccggccccgagagtgagctttccttcccagaagtctcccgagagacatatttgtgtggcctagaagtcctctgtggtctcccctcctctgaagactgcctctggcctgcagctgacctggcaaccattcaggcacatgaaggtggagtgtgaccttgatgtgaccgggatcccactctgattgcatccatttctctgaaagacttgtttgttctgcttctcttcatataactgagctggccttatccttggcatccccctaaacaaacaagaggtgaccaccttattgtgaggttccatccagccaagtttatgtggcctattgtctcaggactctcatcactcagaagcctgcctctgatttaccctacagcttcaggcccagctgccccccagtctttgggtggtgctgttcttttctggtggatttaatgctgactcactggtacaaacagctgttgaagctcagagctggaggtgagcttctgaggcctttgccattatccagcccaagatttggtgcctgcagcctcttgtctggttgaggacttggggcaggaaaggaatgctgctgaacttgaatttccctttacaaggggaagaaataaaggaaaggagttgctgccgacctgtcactgtttggagattgatgggagttggaactgttctcagtcttgatttgctttattcagttttctagcagcttttaatagtcccctcttccccactaaatggatcttgtttgcagtcttgctgacagtgtttgctgtttaaggatcataggattcctttcccccaacccttcacgcaaggaaaaagcaaagtgattcataccttctatcttggaaaaaaaaaaaa

SEQ ID NO: 2691 - DNA, 16599 bp, Homo sapiens; identical to SEQ ID NO: 2300

SEQ ID NO: 2692 - DNA, 549 bp, Homo sapiens
tttcatatttctatgtctttgtcactctatggtgctctagctaatttgtttcagctctttcaattcttcaactctctccttagctgtatacaatctgctgtttaacccattcacagagttttacatttcaacaattaaattctttaaagttctatcatcctgttctttttaaaattcatctggtcatttttgacacctcttgttgcttgctcattcttgtgagtctaccttttatttctatgtatataaaatgtactttaatatttatattccactagtgtatatattccatccatcagatgttacagtcaacatctgataatttcagtatcttatgtccttgaacatctaaattttgctagtctctaactgaagtggcgacaagtgcacttgcctctagtggagttccttctgttgaattttcttgctgctcactgctctagctctaggttcaactcatcagcttttgggggtgggacaggtggtgctgaaggagttactatgtttaaagatttctctggccaggagcggtggctcgctggctcacgt

SEQ ID NO: 2693 - DNA, 1700 bp, Homo sapiens; identical to SEQ ID NO: 2310

SEQ ID NO: 2694 - DNA, 3897 bp, Homo sapiens
gaaggtaaaaaaaagagggaggtctgagaaatagaaatatcagaggaaggaaataaaggagggtgagagtaaattctcttttagcattcagattccacagattccacaaatcacatttctttttttaccaactaaggaaaaataacacttgacctaacatttcattgcagttagctaaaggatgctagaaaaactatgttgcagtggtttgctctaatttcttcaggaatagagaaaagtgacaaaaagatcagagaagagaagaaaggaaactatcagaaaaatacagaattggagtaggatataacatatttgggttgaaggtaaaattttatattgtaatcttaagtatcttgctacttcagtttggtccctggaacagcagcatcagaatctgccgagggcttgttaaaaaggcagaatctcaggtcccatcccagactcactgaatcagaatataaatactgacaagatgccccgggattcatatgcacagtagagctggcgaagttccattgtagcctgtgattgttttctgcaacttagtatttctgagttttcccaaggaagaaaacccaggccttagcttctggcagacttgtgtttctcctttacttactagctgcatgactcatgagcaaggaaatcaaactttatgtgcctgagtttcctcatctataaaatggagactataataatcatctcctaggcttgttttgaggatgttcaacaaatgctcctttcattcctctatttacagacctgccgcagacaattctgctagcagcctttgtgctattatctgttttctaaacttagtaattgagtgtgatctggagactaactctgaaataaataagctgattatttatttattttctcaaaacaacagaatacgatttagcaaattacttcttaagatattattttacatttctatattctcctaccctgagttgatgtgtgagcaatatgtcactttcataaagccaggtatacattatggacaggtaagtaaaaaacatattatttattctacgtttttgtccaaaaattttaaatttcaactgttgcgcgtgtgttggtaatgtaaaacaaactcagtacagtagtattcagtacagtatttaagcccctgtacttaaacatattcctcgtaccaatgaagttacatgaaaagcaaatttgtgtgagatatcgtagatggaagtaaattagtctttatgttccccacaaattgaaatgcatttcaaaaactctgtgtgtgtatgtgtgtgtgtgacagagtgtgtgtgagagagagacagagagatacgctttggttgcctccataagctggctgctatgattaataagaccaagttttctaaagaaaatgagatcataacaaaagccctctttatgactatcttttatcaggggcaaaaaggaaagagacaaaacagcatgaaatgatgagaccaagtgatgaaaattcattcacaatgattgctttcaagagtaatttctcttgggtaattcagcagcctgttactatggctctctggagtgatagctaatgtaaatgaagcctctaaaagtggattatcctgacaagaatatactcagccaataatgcaacagaaatccattcaaagcattcgggaaaaattcaaaagaataaatattctttttttttttttaaagttaatgacctacgatccatttcttccctgactaacaagcagcaagcacttaaaaatatccagccaggatgaaatagaaacccacctgacttgttaatatttttgtttggtcccagggactcagattctaagccaaattctttgaatgatcttggcaaatgtctcgaattatttttgccaacttttctttatcttggaaaaaaagtttcatgaatgggtgtcaaaattgattagttttaaaaacctttcttgcagatacgtatggcaccctaaaactgtattagaaaaaaatttcatatctccaggcctttcattgggtcaggttggcatttcgctgccctttatgtgtgtgacaagtgaaaataaggaaagaaaaaaactcaagtgaagaaaatcagaatctgcgcagcagttcctgggcgtttcagctgcttcccacatcacctgcctcatcaagccccagcatccatctccttgctcatcttacaccctgtgtgcatgacaggcccaccattcatttatcagagcaaaggctctcccactattctggttcacccccctacttagccagatatacaagaatatctgcacggatgacctgcctcacctgggagctcagaggagctcagattccattactatcgcaccaaggacagatctcccagcaagaatgacagaaaagactaactgcccccaaaatctcccttccaaaacacagttctcttaattctcccaagaaaccagaatgtgactgctcacctctctaaggacctgaaaacaactggccatttcagctatttaaatcaactttaaaaaatccaaccgccaaaatattaaaccattttggttggaatgataacataactaacctgctgacagctgcttctgctaggtgcaaaaatggaaaaaaaaatacttctaatcaggtcaaatcactctacctttgggattctaaatttactcatattctcaaagaaatatattcagtcatagtggggaaaataggattattcctttagctcgataagcaaccagaagttcttccttcaaatcttgacatttaatcaatcagaaattgatttttggaaaactgtttcctatgaagctatctctgcctgaaggatttttcttttacaatccagactatagaaggaaattcacaacctggactttcacctccattggtcagagttttactgaccaattcccacctctgccttacacctaacggaagtttatgcctgttttctcttcacataccccaacagttacaaatggttgttattattaagcatcttttattttgtggcctctgattacatggtcccctaaattttgacctaatcacaaaagattggtaaaatttcttaacatattaataatattttgtttatgtgtcaatatcttagcatgtatcaattaagacagaggtcttaacgttctctttttgaaagagaatattaggattcagagatattaagagattctcccaggatcacagttaggtaacagagctggattttagtccaggtctgtctacagctctaacgtatatacaccctttgtataacatgtcacgaattcagcataaagggatcttcagtgatctaagtcaggggtcagcaaccttttctaaaaaggaccaaatagtaatatttcaggctttgtggaccctatggtctctatcataactgttcaaatcaccatgtagtgtaaaaggagccataagcaaaatataaactaacgaatgtggctgttttatgggatttttttttaactctttatttacaaaagcaggtggcagatcagaactcacttatgggccatagttctctgacccctgacctgagaaaatcttatatttatggacaacatttagactgtgacttgccaagtaagaacaagaagctctgtcaactgaaggtcaaggctggagttctgaaagcaaagagctgtctggtgttaatgataagtgaaatagttaaagttagaagatcccagttataagaagcacaaagaataatgaccatagactcctgaacaagaatgtctggacttctggcttaggcactcttgttgtatggtccaggccaagttacctaatctctccaggcctccattttcttatcattaaatgaagataataaaagtattttcctcagagagctgtaagaataaactgagctaacccatgtcaagcacatagaatagg

SEQ ID NO: 2695 - DNA, 4348 bp, Homo sapiens; identical to SEQ ID NO: 189

SEQ ID NO: 2696 - DNA, 3180 bp, Homo sapiens; identical to SEQ ID NO: 2607

SEQ ID NO: 2697 - DNA, 845 bp, Homo sapiens; identical to SEQ ID NO: 2327

SEQ ID NO: 2698 - DNA, 3100 bp, Homo sapiens
cgccccccctccttcataaagtcctggcctcgggacagcctgcacagctgcctagcctgtggagacgggacagccctgtcccactcactctttcccctgccgctcctgccggcagctccaaccatgggaggccgcgtctttctcgcattctgtgtctggctgactctgccgggagctgaaacccaggactccaggggctgtgcccggtggtgccctcagaactcctcgtgtgtcaatgccaccgcctgtcgctgcaatccagggttcagctctttttctgagatcatcaccaccccgacggagacttgtgacgacatcaacgagtgtgcaacaccgtcgaaagtgtcatgcggaaaattctcggactgctggaacacagaggggagctacgactgcgtgtgcagcccgggatatgagcctgtttctggggcaaaaacattcaagaatgagagcgagaacacctgtcaagatgtggacgaatgtcagcagaacccaaggctctgtaaaagctacggcacctgcgtcaacacccttggcagctatacctgccagtgcctgcctggcttcaagttcatacctgaggatccgaaggtctgcacagatgtggacgagtgcagctccgggcagcatcagtgtgacagctccaccgtctgcttcaacaccgtgggttcatacagctgccgctgccgcccaggctggaagcccagacacggaatcccgaataaccaaaaggacactgtctgtgaagatatgactttctccacctggaccccgccccctggagtccacagccagacgctttcccgattcttcgacaaagtccaggacctgggcagagactccaagacaagctcagccgaggtcaccatccagaatgtcatcaaattggtggatgaactgatggaagctcctggagacgtagaggccctggcgccacctgtccggcacctcatagccacccagctgctctcaaaccttgaagatatcatgaggatcctggccaagagcctgcctaaaggccccttcacctacatttccccttcgaacacagagctgaccctgatgatccaggagcggggggacaagaacgtcactatgggtcagagcagcgcacgcatgaagctgaattgggctgtggcagctggagccgaggatccaggccccgccgtggcgggcatcctctccatccagaacatgacgacattgctggccaatgcctccttgaacctgcattccaagaagcaagccgaactggaggagatatatgaaagcagcatccgtggtgtccaactcagacgcctctctgccgtcaactccatctttctgagccacaacaacaccaaggaactcaactcccccatccttttcgccttctcccaccttgagtcctccgatggggaggcgggaagagaccctcctgccaaggacgtgatgcctgggccacggcaggagctgctctgtgccttctggaagagtgacagcgacaggggagggcactgggccaccgagggctgccaggtgctgggcagcaagaacggcagcaccacctgccaatgcagccacctgagcagctttgcgatccttatggctcattatgacgtggaggactggaagctgaccctgatcaccagggtgggactggcgctgtcactcttctgcctgctgctgtgcatcctcactttcctgctggtgcggcccatccagggctcgcgcaccaccatacacctgcacctctgcatctgcctcttcgtgggctccaccatcttcctggccggcatcgagaacgaaggcggccaggtggggctgcgctgccgcctggtggccgggctgctgcactactgtttcctggccgccttctgctggatgagcctcgaaggcctggagctctactttcttgtggtgcgcgtgttccaaggccagggcctgagtacgcgctggctctgcctgatcggctatggcgtgcccctgctcatcgtgggcgtctcggctgccatctacagcaagggctacggccgccccagatactgctggttggactttgagcagggcttcctctggagcttcttgggacctgtgaccttcatcattttgtgcaatgctgtcattttcgtgactaccgtctggaagctcactcagaagttttctgaaatcaatccagacatgaagaaattaaagaaggcgagggcgctgaccatcacggccatcgcgcagctcttcctgttgggctgcacctgggtctttggcctgttcatcttcgacgatcggagcttggtgctgacctatgtgtttaccatcctcaactgcctgcagggcgccttcctctacctgctgcactgcctgctcaacaagaaggttcgggaagaataccggaagtgggcctgcctagttgctggggggagcaagtactcagaattcacctccaccacgtctggcactggccacaatcagacccgggccctcagggcatcagagtccggcatatgaaggcgcatggttctggacggcccagcagctcctgtggccacagcagctttgtacacgaagaccatccatcctcccttcgtccaccactctactccctccaccctccctccctgatcccgtgtgccaccaggagggagtggcagctatagtctggcaccaaagtccaggacacccagtggggtggagtcggagccactggtcctgctgctggctgcctctctgctccaccttgtgacccagggtggggacaggggctggcccagggctgcaatgcagcatgttgccctggcacctgtggccagtactcgggacagactaagggcgcttgtcccatcctggacttttcctctcatgtctttgctgcagaactgaagagactaggcgctggggctcagcttccctcttaagctaagactgatgtcagaggccccatggcgaggccccttggggccactgcctgaggctcacggtacagaggcctgccctgcctggccgggcaggaggttctcactgttgtgaaggttgtagacgttgtgtaatgtgtttttatctgttaaaatttttcagtgttgacacttaaaattaaacacatgcatacagaaaaaaaaaaaaaaaa

SEQ ID NO: 2699 - DNA, 9390 bp, Homo sapiens
gaggcggtggcggcggaggcggcaccgattgctgtgtcggccccagtgcggccgaagtcgcggtagagcgtagccccacgcccctcccccgtccgcgccctccctctttccctggggatggagaaggcgacggttccggtggcggcggcgacggctgcagaaggagaagggagccccccggcggtggcggctgtggcgggcccccccgcggcggcggaggtcggcggcggcgttggcggcagcagcagagctcgctcggcctcgtctcctcgtgggatggtgcgagtctgcgacctgctcctgaagaagaagccgccgcagcagcagcaccacaaggccaagcgtaaccggacttgccgaccccccagcagcagcgaaagcagcagcgacagcgacaacagcggcggcggtggaggcggcggtggaggcggaggtggcggcggcggcaccagcagtaacaacagcgaggaagaagaggacgacgacgacgaggaagaggaggtttctgaggtggagtctttcattttggatcaggatgatttggaaaatccaatgctggaaacagcttccaagttgctcttatcaggtactgctgatggtgcagacctcaggacagtagatccagaaacacaggctagactggaagctttactagaagctgcaggaataggaaaattgtccacggctgatggtaaagcctttgcagatcctgaagtacttcggaggttgacatcgtctgttagttgtgcgttggatgaagctgctgctgcacttacccgtatgagagctgaaagcacagcaaatgcagggcagtcggacaaccgcagtttggcagaagcctgttcagaaggagatgtaaatgctgtgcgaaagttactcattgaagggcgaagtgtaaatgaacacacagaggaaggggagagcctcctttgtttagcttgttctgctggatactatgagcttgcacaggttttgttggcaatgcatgcaaatgtggaagataggggaatcaaaggtgacattacacctttaatggctgctgctaatggaggacatgtcaaaattgtgaagttgctgctagctcataaagcagatgttaatgcacagtcttcaacaggcaatacagcacttacatatgcttgtgctggaggctatgtagatgttgtaaaggtgctcttggaatccggtgctagtattgaggaccataatgaaaatggtcatacccctcttatggaagctggaagtgctggacatgtggaagtagccagattgctgctagaaaatggggctggcattaatacgcattctaatgaatttaaagagagtgcccttaccttagcttgttacaaaggacacttagagatggtgcgatttcttttggaagcaggcgcggatcaagagcataaaacagatgaaatgcacactgctctgatggaggcttgcatggatggccatgttgaagtagctaggttacttcttgacagcggtgcccaagtgaacatgcctgctgattcatttgagtcaccattaactttggctgcatgtggtgggcatgtggaacttgcggctttacttattgaaagaggagctagcctggaagaggtcaatgatgaaggttatacaccattgatggaagcagctcgagaaggacatgaagaaatggtggcattacttcttggtcaaggagcaaatatcaatgcacagacagaagaaactcaagaaactgccttgactctggcttgctgtggaggctttctggaagtggcagactttctaattaaggcaggagccgatatagaactagggtgttctacccctttaatggaagctgctcaagagggtcatttggagttagttaaatacttattagctgcaggagctaacgttcatgcaacaacagcaacaggggatacagcactaacatatgcctgtgaaaatggtcatactgatgtagcagatgtcttacttcaggcaggcgcagatctggaacatgaatctgaaggtggaagaactcctttaatgaaagctgcaagagctggtcatgtttgtactgttcagttcttaattagtaaaggagcgaatgtgaatagaaccacagctaataatgaccatactgtactgtccctggcttgtgcagggggtcatctggcagtggtggaactacttttggctcatggggcagatcctactcaccgtttgaaagatggctcaactatgttgatagaagcagcaaaaggtggccatacaagtgttgtttgctatctcttggattatcctaataacttgctttcagcccctccaccagatgtcactcagttaactcccccatcccacgatttaaatagggctcctcgtgtaccagttcaagcactgcccatggttgttccacctcaggagcctgacaaaccacctgccaatgttgccaccactcttcccatcaggaataaagctgcttctaaacaaaagtccagcagccatttgccagcaaacagccaggatgtacagggttacatcaccaatcagtctccagagagcattgtagaagaggctcagggaaagttaacagaactggaacagaggataaaagaagccatagaaaagaatgcacagctgcagtccttggaactggctcatgctgaccaacttaccaaggagaagatcgaggagctcaacaaaacaagggaggaacaaattcagaagaaacaaaagattttggaggaactacagaaagtagaacgagagttacaactgaaaactcagcagcagctaaaaaagcagtatctagaggttaaagctcaaagaattcaacttcagcaacagcagcaacagtcttgccaacacctgggattactaactcctgttggagttggagagcagctttctgagggagactatgcacggttacagcaagtggatcctgttttacttaaagatgaaccccagcagactgctgctcagatgggttttgcgccaatccagcctctggcgatgcctcaagctttgcctctggcggcaggtcccttgcctccagggtccatcgcaaatcttacagaactgcaaggagtgatagttggacagccagtactgggccaagcacagttggcagggctggggcaaggaattctgacagaaacacaacaagggttaatggtagccagccctgctcagaccctcaatgacacgctggatgacatcatggcagcagtcagtggaagagcatctgcaatgtcaaacactcctacccacagtattgctgcatccatttcccaacctcagactccaactccaagtcctatcatctctccttcagccatgcttcctatctaccctgccattgatattgatgcacagactgagagtaatcatgacacggcgctaacacttgcctgtgctggtggccacgaggaactggtacaaacactgctagagagaggagctagtatagagcaccgagacaagaaaggttttactccactcatcttggctgccacagctggtcatgttggtgttgtggaaatattgctggacaatggtgcagacattgaagcccagtctgaaagaaccaaggacacaccactctccttggcttgttctgggggaagacaggaggtggtggagctattgttagctcgaggggcaaataaagagcacaggaatgtttctgattacacacctctaagtctggctgcttctggtggctatgtgaacatcatcaaaatattactaaatgcaggagctgagattaactctagaactggtagcaaattgggcatctctcctctgatgttagcagctatgaatgggcatacagctgctgttaagctcctgttagacatgggctctgacataaatgctcagatagaaaccaatcggaacactgcccttactttagcctgcttccaaggaagaactgaagtggttagtcttctgcttgatagaaaagcaaatgttgaacacagagctaagactggtctcacaccactaatggaagctgcctctggtggatatgcggaggtgggccgagttcttttggataaaggtgctgatgttaatgcccctccagttccctcctcaagagatacagctttaaccatagcagcagataaagggcattacaaattctgtgagcttcttattggcaggggagctcatattgatgtacgtaacaagaaggggaacactccattgtggctagcagcaaatggtggacacctcgatgtggttcagttactggtgcaagcaggtgcagatgtggatgcagcagataaccgcaagataactcctcttatggcagcatttagaaagggtcatgtgaaggtggtgcgctacttagtcaaagaagtcaatcagtttccatcagattctgaatgtatgagatacatagcaaccatcactgataaggagatgctgaagaagtgtcatctttgtatggagtcaatagtacaagccaaagatagacaggctgctgaagcaaacaaaaacgccagcattttgttagaggagttagacttggaaaagttaagggaagaaagtcggaggctggctttggctgcgaaaagagaaaaaagaaaagagaagagaaggaagaaaaaggaagaacaaagaaggaaactagaagaaattgaagccaaaaataaagagaactttgaactccaagctgctcaagaaaaagaaaagcttaaagttgaagatgagcctgaagtcttgacagaacctccaagtgccacaaccactactaccataggtatatctgcaacctggacaactttggcaggttctcatggtaaaagaaataataccataactacaaccagttcaaagaggaaaaacaggaaaaataaaattactccagaaaacgttcaaattatatttgatgatccactaccaatttcatacagtcagccagagaaggtgaatggagagtccaagagcagcagtaccagcgagagtggggacagtgataacatgaggatttccagctgcagcgatgaaagtagtaacagcaacagcagtcgtaagagtgacaatcattcaccagctgtggtcactaccactgtgagcagcaaaaagcagccatcagttcttgttacatttccaaaggaagagagaaaatctgtttctggcaaggcttcaataaaattgtcagaaactatcagtgaagggaccagtaattctctatctacttgtacaaaatctggtccatctcccctttcttctccaaatgggaagttaacagtagcaagtcctaagcgtgggcaaaagagggaagaaggatggaaagaagttgtaagaaggtcaaagaaagtatctgttccatcaactgtgatatccagagtgattggaagaggaggctgtaatatcaatgctattcgggagtttactggtgcacacatagatattgataaacagaaagacaagactggagaccggataatcactataaggggtggcactgaatcaacaagacaagcaactcaattgattaatgctttgatcaaggatccagacaaagaaattgatgaacttattccaaagaatcgtttgaaaagctcctcagcaaattccaaaatagggtcatcagcacctaccaccactgctgctaacacttccttaatgggaattaaaatgacaactgtagctctgtcatcaacatctcaaactgccacagcactcactgtgcctgcaatttcttctgcatccactcacaaaaccattaagaacccagtgaataatgtgaggcctggttttccagtttctcttccattagcatatcctcctccacagtttgcacatgctttgcttgctgctcagactttccagcagatccgtccaccaaggttgcccatgacccactttggaggtacttttccaccagctcaatccacttggggtccgtttcctgtcaggcctttgagccctgccagagctactaactcgcctaagcctcacatggtgcctcgccatagcaatcagaatagcagtggttctcaggtgaattcagcaggttctttaacttcaagcccaacaactacaaccagttcatcagcttcaacggtgcctggtacatctacaaatggcagtccaagttcaccttctgtccgaaggcagctttttgtcacagttgtgaagacatccaatgccaccacaacaacagtcacaaccacggcaagcaacaacaacactgcacccacaaatgccacatatcctatgcctactgccaaagaacactatccagtatcatccccatcttccccatcaccaccagcccagccaggaggggtttctagaaacagccctttggattgtggatcagcatctccaaataaagtggcatcttcctccgaacaggaagcaggtagtccaccagtagtagaaacaacaaacactagacctccaaacagcagcagttcttctgggagttcatcagctcattctaatcagcaacaacctccgggatctgtttctcaggaaccaagaccacctcttcagcagtctcaggttcctcccccggaagttagaatgactgttcctcctttagcaacaagttctgctccagtggcggtgccttctactgccccagtgacttaccctatgcctcagacaccaatgggatgcccccagcctactcctaaaatggaaacccctgctattagaccaccccctcatggcacaactgcccctcacaagaattcagcttcagtgcaaaattcatctgttgcagtcctcagtgtcaatcacattaaaagacctcacagtgttccctcttctgtccagctaccttcgaccttaagtacacaaagtgcttgtcagaattcagtacatccagcaaataagcctattgctcccaatttcagtgcccccttaccatttgggccctttagcacattgtttgaaaacagccctacttctgctcatgccttctggggaggatctgttgtttcatctcagtcaacaccagaatctatgctatcaggaaaatcctcatatttgccaaattcagatcctttacatcagtctgatacttccaaagctccaggttttagaccaccattacagagacctgctccaagtccctcaggtattgtcaatatggactcgccatatggttctgtaacaccttcttcaacacatttgggaaactttgcttcaaacatttcaggaggtcagatgtacggacctggggcaccccttggaggagcacccgcagctgctaactttaacagacaacatttttccccgcttagtttgttgactccgtgttcatcagcatcaaatgattcttctgcacagtcagtatcctcgggagttcgtgcaccatctcctgccccatcatcagtaccgttagggtcagaaaagcccagcaatgtgtctcaggacaggaaagttccagtccctattgggactgaacgttctgcacgtatcaggcaaactggaacgtcagctccatctgttattgggagcaatttgtctacatcagtaggacatagtggcatctggtcctttgaagggattggtggcaatcaagacaaagtagactggtgtaaccctgggatgggaaatcctatgatccacagaccgatgtctgacccaggagtattttcacaacatcaagcaatggagcgagatagtacaggaattgtaactccttctggtacattccatcagcatgttcctgcaggctacatggactttcctaaagttgggggtatgcctttttctgtgtatgggaatgcaatgattcctccagtagcacctatccctgatggtgctggaggacccatatttaatggccctcatgctgcagacccttcttggaactcactgataaagatggtttccagctccacggaaaataatggccctcaaacggtgtggactggaccctgggcacctcacatgaacagtgtgcatatgaaccagcttggctgatgaggatcagcttgttagcctgcagattccttttcatttggaggaaatcacaagtggccgaaaaaaaaaattatgctcccaaatcattctactgatgtgcttgactgaagtgtgtaggctttttgcagaagatcttactaactgacctattttctgtgaacatttgtgactgcccattccccatcatcatccgttttaccttagttagcatttttcttatcatttttctttttttctttccctcttcccctttggacataactttctgttgaagctgttctttggctggttggttttagtactgtaaactgcttctgagcaaacacggaaatttagcaaaattatgtaaacttgatcctgaagttttagaatggcaaataaatgtacaattgtttacataacagaaaaggctaagcagaaagtaaatttcaatatgtcagtatagaggctctactttatgtagacttaaattaatgtgagatatgtaccttcatattcagaaatctggatgtttccttcatacattaaactattaataagcataacttttctactggtgtaatttaagtataaagtaaaataatgggcattatcattggatgtttccccacattggcttttaaaatacccatcttgctttctttttggtttatttgtagcaaggcacatatagaagaagaaatttctggcttttccatgttgttttattaccttttctcacttttaaaactaatacagacttatctcctcactcctttttctctccttacctttaccactaataccagtaaaattatctttctgatagtgaaaaggttctgtcaagattttcactgtaatggctgctacagagatggaccatcttcatcatcaccagtggtttcttctaattataaaatgtttaaactttctgagaatttaaaaagccaccactgttcccagtcagcatatacaagctcttaatattctgtttattaaataattcaatgtactattttatattggatgatattgattcttaacattggcttttcagtcatcaacagtcaacataaaaatttcaattttcagtaatttagtggaaaatatcttatttcttttttcaattttaaaggcttcctgcttttttacccttgtatattatcagtgaaaaggatcaacagttaatttgagccaagtaataaaagaaattctgcatttgtcacgaagacaatttatggtagacagataaatacacagattacagtgtaaagtctccatttaacctgtttataaaagatacaaggccacactaaactactcagtgggatttatatattccatccacttgaaacaataaacagtaatgtatccaagaagattatgtgtcctaccctgtctcatggaaaaattaattatatggttgaaatgtaaaagaaagtaagcataaaaatcgagtaatgtataaaaaaaaaaaaaaaa

SEQ ID NO: 2700 - DNA, 717 bp, Homo sapiens
atggaaaccccagcgcagcttctcttcctcctgctactctggctcccagtttcagataccactggagaaatagtgatgacgcagtctccagccaccctgtctgtgtctccaggggaaagagccaccctctcctgcagggccagtcagagtgttagaagcaacttagcctggtaccagcagaaacctggccaggctcccaggctcctcatctatgctgcatccaccagggccactggtatcccagccaggttcagtggcagtgggtctgggacagagttcactctcaccatcagcagcctgcagtctgaagatttcgcagtttattactgtcagcagtataatgaatggtttcggacgttcggccaagggaccaaggtggaaatcaaacgaactgtggctgcaccatctgtcttcatcttcccgccatctgatgagcagttgaaatctggaactgcctctgttgtgtgcctgctgaataacttctatcccagagaggccaaagtacagtggaaggtggataacgccctccaatcgggtaactcccaggagagtgtcacagagcaggacagcaaggacagcacctacagcctcagcagcaccctgacgctgagcaaagcagactacgagaaacacaaagtctacgcctgcgaagtcacccatcagggcctgagctcgcccgtcacaaagagcttcaacaggggagagtgttagagggag

SEQ ID NO: 2701 - DNA, 3300 bp, Homo sapiens; identical to SEQ ID NO: 2689

SEQ ID NO: 2702 - DNA, 3897 bp, Homo sapiens; identical to SEQ ID NO: 2694

SEQ ID NO: 2703 - DNA, 4153 bp, Homo sapiens
acgagagccgggtggacccagggtggggaactacctcttcctctccacgcggttgagaagaccggtcggcctgggcaacctgcgctgaagatgccgggaaaactccgtagtgacgctggtttggaatcagacaccgcaatgaaaaaaggggagacactgcgaaagcaaaccgaggagaaagagaaaaaagagaagccaaaatctgataagactgaagagatagcagaagaggaagaaactgttttccccaaagctaaacaagttaaaaagaaagcagagccttctgaagttgacatgaattctcctaaatccaaaaaggcaaaaaagaaagaggagccatctcaaaatgacatttctcctaaaaccaaaagtttgagaaagaaaaaggagcccattgaaaagaaagtggtttcttctaaaaccaaaaaagtgacaaaaaatgaggagccttctgaggaagaaatagatgctcctaagcccaagaagatgaagaaagaaaaggaaatgaatggagaaactagagagaaaagccccaaactgaagaatggatttcctcatcctgaaccggactgtaaccccagtgaagctgccagtgaagaaagtaacagtgagatagagcaggaaatacctgtggaacaaaaagaaggcgctttctctaattttcccatatctgaagaaactattaaacttctcaaaggccgaggagtgaccttcctatttcctatacaagcaaagacattccatcatgtttacagcgggaaggacttaattgcacaggcacggacaggaactgggaagacattctcctttgccatccctttgattgagaaacttcatggggaactgcaagacaggaagagaggccgtgcccctcaggtactggttcttgcacctacaagagagttggcaaatcaagtaagcaaagacttcagtgacatcacaaaaaagctgtcagtggcttgtttttatggtggaactccctatggaggtcaatttgaacgcatgaggaatgggattgatatcctggttggaacaccaggtcgtatcaaagaccacatacagaatggcaaactagatctcaccaaacttaagcatgttgtcctggatgaagtggaccagatgttggatatgggatttgctgatcaagtggaagagattttaagtgtggcatacaagaaagattctgaagacaatccccaaacattgcttttttctgcaacttgccctcattgggtatttaatgttgccaagaaatacatgaaatctacatatgaacaggtggacctgattggtaaaaagactcagaaaacggcaataactgtggagcatctggctattaagtgccactggactcagagggcagcagttattggggatgtcatccgagtatatagtggtcatcaaggacgcactatcatcttttgtgaaaccaagaaagaagcccaggagctgtcccagaattcagctataaagcaggatgctcagtccttgcatggagacattccacagaagcaaagggaaatcaccctgaaaggttttagaaatggtagttttggagttttggtggcaaccaatgttgctgcacgtgggttagacatccctgaggttgatttggttatacaaagctctccaccaaaggatgtagagtcctacattcatcgatccgggcggacaggcagagctggaaggacgggggtgtgcatctgcttttatcagcacaaggaagaatatcagttagtacaagtggagcaaaaagcgggaattaagttcaaacgaataggtgttccttctgcaacagaaataataaaagcttccagcaaagatgccatcaggcttttggattccgtgcctcccactgccattagtcacttcaaacaatcagctgagaagctgatagaggagaagggagctgtggaagctctggcagcagcactggcccatatttcaggtgccacgtccgtagaccagcgctccttgatcaactcaaatgtgggttttgtgaccatgatcttgcagtgctcaattgaaatgccaaatattagttatgcttggaaagaacttaaagagcagctgggcgaggagattgattccaaagtgaagggaatggtttttctcaaaggaaagctgggtgtttgctttgatgtacctaccgcatcagtaacagaaatacaggagaaatggcatgattcacgacgctggcagctctctgtggccacagagcaaccagaactggaaggaccacgggaaggatatggaggcttcaggggacagcgggaaggcagtcgaggcttcaggggacagcgggacggaaacagaagattcagaggacagcgggaaggcagtagaggcccgagaggacagcgatcaggaggtggcaacaaaagtaacagatcccaaaacaaaggccagaagcggagtttcagtaaagcatttggtcaataattagaaatagaagatttatatagcaaaaagagaatgatgtttggcaatatagaactgaacattatttttcatgcaaagttaaaagcacattgtgcctccttttgaccacttgccaagtccctgtctctttcagacacagacaagcttcatttaaattatttcatctgatcattatcatttataactttattgttacttcttcatcagtttttccttttgaaaggtgtatgaattcattacatttttattctaatgtattatctgtagattagaagataaaatcaagcatgtatctgcctatactttgtgagttcacctgtctttatactcaaaagtgtcccttaatagtgtccttccctgaaataaatacctaagggagtgtaacagtctctggaggaccactttgagcctttggaagttaaggtttcctcagccacctgccgaacagtttctcatgtggtcctattatttgtctactgagacttaatactgagcaatgttttgaaacaagatttcaaactaatctgggttgtaatacagtttataccagtgtatgctctagacttggaagatgtagtatgtttgatgtggattacctatacttatgttcgttttgatacatttttagcttctcattataaggtgattcatgctttagtgaattcttcatagatagtatatataaaagtacattttaatagaaagccagggttttaaggaatttcacatgtataaggtggctccatagctttatttgtaagtaggctggataaatggtgcttaaatggtaatgtactccacttcttcctattggaagattaacattatttaccaagaaggacttaagggagtagggggcgcagattagcattgctcaagagtatgtaaaaaaaaaaaaaaaaaaaaagaaccaaaccactggaaataatcaaatgcaaaaaggtaacaaattcataactggaaagcaaagagaagaacaagtatgatttggatgataaagcattgttttaatggtgaaaacttcacagatcactaatgtttctagaggttaacttcaagtgggcaagctggggtttttaggtagtcagtggcctagttcctaaagccacagtataggatctgttaaactgaatgtctgttgaaagtttgttttagctgcttggaggcttccttttaagacaaactgtatgtgattaagttgttttgagggaactgaagaacctgatgtagcccctggccagataactgcctgatttctcagatattatttctctgggaaacattctacatagcacaggagcttaagagtggcattatcttctcgccttaatttccagagattatttctgtactgagaatcctggaactactatgctaggaaatttaaagctgcatggtctgtcttgttttcatttaattattgtgaatacctagaatctttcttggtcctgatttctcttgcttaatccagtctttatctctaactgccccttatttgatcaccatgtactaggagctctgatagccagctcagctcctaatccttgaggcaacattctttttctatttgaacttcagttctgtccttgaatcccgactagatatttcttgccctctggtctcagaattctcttggcttttattccttgatccacttgccagttttatcactttacccttgttcctcatggcttcccatcaagccatgggt

SEQ ID NO: 2704 - DNA, 3209 bp, Homo sapiens
gcctcgtgcccgcgccggtcggttggtggcgcctttgtcctacggcgggcaggtgggccgacgcggaggcggcagcggcgggcctgaggcgaaggagcggccgggagcccgccgcgctggtagcgatattaataaggcagcggaaagaagaaatatgaatacggctccatcaagacccagccccacacgaagggatccatatggctttggagacagtcgagattcaaggcgtgatcgatccccaattcgaggaagtccaaggagagagcccagggatggcagaaatggccgggatgcccgggacagcagagacattcgagacccccgagacttgcgggaccacagacatagtagagatttgcgggatcacagagacagcaggagtgtgcgcgacgttcgggacgtgagggatcttagagactttcgtgatctaagagactctagggattttcgagatcagcgagaccccatgtacgacagatacagagacatgagagactcccgagatcctatgtacaggagagaaggctcttatgaccgatacctacgaatggatgactattgcaggagaaaggatgactcttattttgaccgttacagagatagctttgatggacggggccctccaggcccagaaagtcagtctcgtgcaaaagagcgtttgaaacgtgaggaacggcgtagagaagagctttatcgtcaatattttgaggaaatccagagacgctttgatgccgaaaggcccgttgattgttctgtgattgtggtcaacaaacagacaaaagactatgctgagtctgtggggcggaaggtgcgagacctgggcatggtagtggacttgatcttccttaacacagaagtgtcactgtcacaagccttggaggatgttagcaggggaggttctccttttgctattgtcatcacccagcaacaccagattcaccgctcctgcacagtcaacatcatgtttggaaccccgcaagagcatcgcaacatgccccaagcagatgccatggtgctggtggccagaaattatgagcgttacaagaatgagtgccgggagaaggaacgtgaggagattgccagacaggcagccaagatggccgatgaagccatcctgcaggaaagagagagaggaggccctgaggagggagtgcgtgggggccaccctccagccatccagagcctcatcaacctgctggcagacaacaggtacctcactgctgaagagactgacaagatcatcaactacctgcgagagcggaaggagcggctgatgaggagcagcaccgactctctgcctggcccgatttcccgccaaccactcggggcgacctcgggtgcctcgctgaagacacagccaagctcccaaccgctccagagcggccaagtgctcccctctgctacacccactccatctgcaccccccacctcccagcaagagcttcaggccaaaatcctcagcctcttcaatagtggcacagtgacggccaatagcagctctgcatccccctcggttgctgccggaaacaccccaaaccagaatttttccacagcagcaaacagccagcctcaacaaagatcacaggcttctggcaatcagcctccaagcattttgggacagggaggatctgctcagaacatgggccccagacctggggctccttcccaagggctttttggccagccttccagtcgcctggcacctgctagcaacatgactagccagaggcctgtgtcttccacaggtatcaactttgacaatccaagtgtacagaaggctctggataccctgatccagagtggccctgctctctcccacctggttagccagaccacagcacagatggggcagccacaggcccccatgggatcttaccagaggcattactgaagctaaatctttcaactctccccagtcccctcatcccctggcctcctcccacttacttgttctaaatagagctgtttggaggatgttctctgcgctcccaggccggcatcgagtgtcatcaatttctaccacctgctctctcttctgcccaaggctgtgttgcttattccttacaaagtttatactgcatttggggctgtatctttttttgttttttgttttgtagaaaataaatatctccgggggcagtacaggtgtctgggcttgtatttgatggggtttctccggtccctgtttctactggatttggagccaggcccagctagccaagtttggaatggcatttgtcatgtcagtagccaccacctttgttcattgtgaacctaccaaggctttccagcttcatacacattgaccagagctcaagctcctgcctgcaactcctgcctagagttgaagaaaagcaaactggccttggcaggcacagtgtcatcataccctcaccccatatgtttggggtctgcttgaggattcataaatcagccactctggattgttgaggaatggccatggcagccacagaaaaaagaatttttctctctgagccaaggttgttttttgtttttttctcttttcttttttgttttcatttcattggaagatctccaatggactgaacagctccagtcagcagcagttaccacaaactgtgaatctgggccccaccactcttccctgttaaccagttctgtcagcatccccctctccagcagcacttccatgaagttggttctgagactctggccgtgaacacccgtttcttcagtgatttgttttgggcttttggctcaaaaccccaggctcttgtttttgtctagactcttattctgtttcctgagcagcaggaggtagggaccactttgatgtcagacttctggtagctggacatgttctcgagatgggtggctgttcgcgacttttgtaccagagtgaaattgttagaaggagggtttctggctgtggttctaaatggagccccaggaagctgccctctccccagggtttgtgctcagtagagccctgtggatcacagtcttgaggtcctctagcaggggtgagggagagcagcgacttcagctgagtccctgccagtggttaagcaaacaatggtttcaaaattcaaggtccccaaatggcagcattttatgttctgacctgtttgtgttatatagtggttttttttttcctctttggaactcttgtgttgttaataaaatgaaatgattactttttaattaaaatgaaaaaagtaaaa

SEQ ID NO: 2705 - DNA, 2956 bp, Homo sapiens
ggggctgagtgctcagtggagagcggggagttgtgtccaccttgccgacgtcgctagccgtggggctgtcctgggaaggcggacggcgagcgcccggtgtccgcactcggccgcctgccgtgcccgtctgcgcccgtgtcatcctcactcgggacgcagggaccgtttttaaatcacaggggcgtgtgtcagcctgccctaggacttcatgtctatatatttccccattcactgccccgactatctgagatcggccaagatgactgaggtgatgatgaacacccagcccatggaggagatcggcctcagcccccgcaaggatggcctttcctaccagatcttcccagacccgtcagattttgaccgctgctgcaaactgaaggaccgtctgccctccatagtggtggaacccacagaaggggaggtggagagcggggagctccggtggccccctgaggagttcctggtccaggaggatgagcaagataactgcgaagagacagcgaaagaaaataaagagcagtagagtccctgtggactcccatgggtcataccagccagcatctgttcctgaactgtgtttttcccatcatgacggaagaagagagtgagccgcaattgttctgaaaatgtcaaacgaggcttctgttttgcacctgcagatcaccgagttggttttcttttcttttcttgcctttttttttttttgaaatttgccgagcagtggagccctctgacaatttgcaaggccctctgagaaaggaagctgcttagagccagggggttagtgggtgaggggagcgagtgctgtttttgagatcattatctgaactcaggcagcctagtagaggcagtggtgggattccaatgggtcttggtgggtgggaggtggggcatgtgcaaagcaagcaaggaacatttggggtaagaaaacaaacatgaggcaaaagaaaaaatacatgtttttaagaaaacattgagcagagaactgcagccaggatgcgctcagcagacattcactctggctgctgggacatcagaaaacaaagtcttcatctctctctccagtttcacccaccccaccctttgctttcatttcaggtgtgttggtctatatgacagggaggagagtaaaggagagcaggagcaattggctgcctgcaaagccagctggaggtgaagtgcaggaaaggaaaggtcaccccattctactccatggcctctctgctcccagctgtggtaggctcacatagccagtgtgatcggtttttaagaggcagtgcttttcagcttttctccctgatatatccattttgcttcccagcactttttaggagtagtgagagcacttcctgcccttgttggaagccccagggtggacactcagcacgaaggtctctcccttaactgctgcccttccaagacttgctcccgagatggagtgggcgtggtcttccaggctggcccttccttctcctcaccgccaccttccctgccccagccccagcagccatgggtacatgggtccccagctcacctatggattcccgccagtctgcccagctgcagtactcacgccccatgggggatcttggtctgtttttcttgtgggagcctagtggagagcagacgtggctttttatgtgtcttgttggggaggtgacttgcatggtggggacaaggctgtcgtggcaaccttgggatcgagtttgagactaaaggatgtcatgagatccctggcttctccccatgttgttcccggacaagggcagaagggaggcatggcaagggacctctgctgtccttactcaacagtggtcctcatccctccccacctcccactgcttcctgcaagggcaccagttgtatgagaaagttggcctttggacttaggatttcttattgtagctaagagccatctgaagcagcaggttgcaggacaaatgcttcagtccgccgagagcagtaccgtgtggccaagaggtggactcagagccttccttgagctaaactcggccaaccaaggcacgcagcatgtcccctcaggtctccagtcagtccaggttgaccctcagttctggacgtgtgtatatagctgtatttaatacctcaaggtcattgtggctctggggatgccggggcaggaggacgagggtgcgctgtggacacagcagtccgcggaattccgttctgggaagccaatggtcgccggcaccccttgcttcctccctctgttgtctgcctgtgtgacacacatcaatggcaataacttcttccaactcctcgcagaagtgggagaggccggcagcctgcaccgagaggggctttcctctctcttgctccccgcttcgttctgttttggctgcagagagtggttcatccatactctcattccctcgcctccccttgtggacgggggtcttgccttttcaattcctgtgttttggtgtcttcccttatctgctaccctgaatcacctgtcctggtcttgctgtgtgatgggaacatgcttgtaaactgcgtaacaaatctactttgtgtatgtgtctgtttatgggggtggtttattatttttgctggtccctagaccactttgtatgaccgtttgcagtctgagcaggccaggggctgacagctaatgtcaggaccctcagcggtggagcctgctggggggacccagctgctcttggacaagtggctgagctcctatctggcctcctctttttttttttttcaagtaatttgtgtgtatttctaactgattgtattgaaaaaattcctagtatttcagtaaaaatgcctgttgtgagatgaacctcctgtaacttctatctgttcttttttgaggctcagggagaaactagcatttttttttttccaaactactttttgtcactgtgacagttgtaaataaagtttgaaaatgctttccactctgaaaaaaaaaaaaaaaaaa

SEQ ID NO: 2706 - DNA, 9732 bp, Homo sapiens; identical to SEQ ID NO: 557

SEQ ID NO: 2707 - DNA, 8168 bp, Homo sapiens; identical to SEQ ID NO: 1283

SEQ ID NO: 2708 - DNA, 3300 bp, Homo sapiens; identical to SEQ ID NO: 2689

SEQ ID NO: 2709 - DNA, 4368 bp, Homo sapiens; identical to SEQ ID NO: 415

SEQ ID NO: 2710 - DNA, 1771 bp, Homo sapiens; identical to SEQ ID NO: 1674

SEQ ID NO: 2711 - DNA, 9215 bp, Homo sapiens; identical to SEQ ID NO: 2354

SEQ ID NO: 2712 - DNA, 1284 bp, Homo sapiens; identical to SEQ ID NO: 2547

SEQ ID NO: 2713 - DNA, 3529 bp, Homo sapiens
ggtcccggccacaagctgtcggctcggttcggtcgcgttacagggcaggcgccggggccaaggcagggagggatcttaggagagatcgtaggacatctgaagagctgccatgtctggggcatcttcctcagaacagaacaacaacagctatgaaaccaaaaccccaaatcttcgaatgtcagagaagaaatgttcatgggcctcctacatgaccaactccccgactctgatcgttatgattggtttgccagcccggggtaaaacctacgtgtccaagaaactaacacgctacctcaactggattggagtccccaccaaagtgtttaatcttggggtgtatcggcgtgaagcagtcaagtcctataagtcctacgacttctttcggcatgacaatgaggaggccatgaagatccgcaaacagtgtgctctggtggcgctggaagatgttaaggcgtatctcactgaggagaatggtcagattgcggtgtttgatgccaccaatacaacccgggagaggagggacatgattttgaactttgctgaacagaattccttcaaggtattctttgtggaatccgtctgtgatgatcctgatgtcattgctgccaatattctggaggttaaggtatcaagccctgactatcctgaaaggaacagagagaacgtgatggaggacttcctgaagagaattgaatgctacaaagttacctaccgacctcttgacccagacaactatgacaaggatctttctttcatcaaggtgataaacgtgggccagcgatttttagtcaacagagtccaggactacatccagagcaagatagtctactacctcatgaatatccacgtccagcctcgcaccatttacctttgccggcatggagaaagcgagttcaatctcttggggaagattgggggtgactctggcctctcggtgcggggaaagcagtttgcccaagctctaaggaaatttctggaggaacaggaaataacagacctcaaagtgtggacaagccagttgaagaggaccatacagactgctgaatctctcggggtgccctatgagcagtggaagattctgaatgagattgatgctggtgtgtgtgaagagatgacctatgcagagattgagaaacggtacccagaagagtttgcacttcgagatcaagagaagtatctgtatcgatatcctggtggggagtcataccaggacctggtgcagcggctggagcctgtcatcatggagctggaacgtcagggcaatgtcctcgtcatctcccaccaggctgtcatgcgctgcctcctggcctacttcttggataagggcgcagatgagctaccatacttgagatgccctctccataccatcttcaaacttactcctgtggcctatgggtgcaaagtggaaacaattaaacttaacgtggaggctgtgaacacgcaccgtgacaagccaactgcagcagagaccacactggctgtgcgcagacgcccctccgcagcgtccctcatgttgccttgctaatgatgtggatgttcaggcctcacctctccaaacgactgggatctactgaaaagcttgggatgtcagcttcacagaggctagaacaggaagttaagtgggaactggactttgggggccaccaaaacgaggcctggagaaacgtcaccatatttcctcccctcctgcctaatgggaatatcagttacactgaaaaatttaacttccctgtgcctcaaaacatttagcaacctgaaccagtgactttttgtcatctctgtgctgagtttggtccaagttggtcaatctcattctgtataggcatttaacatcctacctgtgactgtctgcatcctttgctggctcttttttgcccaaagtgcaaatgcacttcttcagatttacttttcaagtgagaaggtaagagctggtctctgccactgttccaggcgagcaggctagagtctaatatacttatgctagcagttaccatttgccacattggaagcaagagacaaatcaccaggtgaatggagggtcttctgagaaattcagtccctaaaacatcttctctgccttgatagaagaacagtgtcagtggcaaccttttcatttagagaagtttttcttgttccaggcccttcaggacaggatctgactgcaagactccccaaaatgggtacccatcttctaagttcccttttgtagctactgtacttttgacttgatgcatgtgcctctcatgcatcaagatggggctgatgtggttctcctgggtggttgggaatgtggactagacagaaaagtagagtgccatttatatcacgtgagtaagtcaagaaagctccttgagaatcagcccgatcagggagtgttttggcttcagaacaggtggaaggagacacgcccctctgtgggctctgtcaccatgatacagtccttgagagagctgtggctgtgacttggagggcagtagtctcctgatacctgcctcttggccactggtcactattgtggtcactgatctctcatataaaagtgagggtggcggggtcatggaccagcgcctcagtgcattagtcattcgcttttccttacagacaaatcagataactcttccccagtgattgtcaaatgtatgaatgtatctctgtaaatgtggttttgacatgtcactgttactgaaggagagtatggaatccccacaggatattatatcttgcaaggaaagtctattttttaaagaatagtatgtttttagctttacttttctttcttttccttttcactcaaatgctcacttgctgggcaaaagggtgagtagcaagaaaagtaatgatatgtagcttttctcaaatggttcttttatactgtggatgatacaggactctgttacctaagatgtgataagctgggctgcaggcggttcagcatccagcaactaggagctgcttttctacgtacaaagctgccttcaggaaggctccttaccctgtagcagatgattttcatctggctgcctaccgcatgctgtactataatgatttagttgtgatatggatttctctctgcatcgaaaactgtcttttgatgatcagacaatgtttatatttagttatttattctatccatgtaaggcatttttgagttttcttgtcactgtttgcatgtatttaatcagaatgtaatataatttatgttgtcaggtttttttttgtttgtttgtttggggttttttttgtagaaatttaggtagttagagcttttaagtctaatgtcatattaacttaagttaaatttccagaacgtagatatctgtcttctgtaaaaggaaaataacgatgttaagggacagtgaattttttttgaatactttgtttctcattgatttttattgtaagtgtaaaccaagagatgcatttctctggagaagtgtttatctcctggattaataaaatcatgctaaaatatgcgagtaatatgtattgcttttgtaataagaacataaaataaaattatttttaatta

SEQ ID NO: 2714 - DNA, 1543 bp, Homo sapiens; identical to SEQ ID NO: 785

SEQ ID NO: 2715 - DNA, 3614 bp, Homo sapiens
gctccgggagagttagggctccgagccgagcgcgcggagcagctggggccggggcgcggatgctggaagttcacatcccgtcggtggggcccgaggccgaggggcccaggcagagcccggagaaaagccacatggtgttccgagtggaggtgctgtgcagcgggcgcagacacacggtgccaaggcgctacagcgagttccacgcgctgcacaagcggatcaagaagctgtacaaagtgcccgacttcccctcgaaacgcctgcccaactggaggaccagagggttggaacagcgccggcagggcttggaggcttacatccagggcatcctgtacctgaaccaggaggtgcccaaggagttactggaattcctgagacttcggcacttccccacagaccccaaggctagcaactggggcaccctgagggagttcctgcctggcgacagcagctcccagcagcaccagcggcctgtcctgagcttccatgtggatccctatgtttgcaacccctccccagagtcgctgcccaacgtggtggtgaatggtgtgctccagggcctctacagcttcagcatcagcccagataaagcccagccaaaggcggcctgtcaccctgctcctctgccaccgatgccctgatcagtccagaggcctttggctgcctcctaagaaagtcatgtgcctctgtcctatgaactccatataaggctgggtcctcctttggcctggacccaggacttaattacccagtgcccagttgtgccacattcccactcaaggctcagaacttggctcgcattggtagctggaggtggtagaatttgtatgctcttagagcccaacagccaaggcagggtcaagaagataagtaataaaagaggaagtcagccaggcgcggtggctcatgcctgtaatcccagcactttgggaggccaagatgggtggatcacctgaagtcaggagttcgagaccagcctgaccaccatggagaaaccccgtctctactaaaaatacaaaattagccgggcattgtggtggtgcatgcctgtaatcccagctactcgggaagctgaggtaggagaatctcttttttttttttttttttttttttgagacggagtttcactcttgttgcccaggctggaatgcaatggcacgatctcggctcacggcaacccccgcttcccgggttcaagcaattctcctgcctcagcctctcgagtagctgggattacaggcatccgccaccatgcccggctaatttttgtatttttaatagagatgggtttcaccacgttggccaggctggtcttgtactcctgacgtcaggtgatccacccgcctcggcttcccaaagtgctgggattacgggcgtgagccaccgtgctcggcccaaggcaggagaatctcttgaagccaggaggcggaagttgtggtgagccgagatcgcgccactgcactccagcctgggcaacaagagtgaaactccgtctcaaaataaataaataataaaggaagaagtcagctgggtgcagaggctcatgcctgtaatcccaatactttaggaggccaaggcaggaggatgcttgggtctggaagtttgagaccagccagcgcaacatagtgagacctgtctctaccaaaaaaaaaaaaaaaaaaaaaaaatcaatttagaggtaggctatgaaaaagtacagatacatcccttaacatagactggagggtggtggcaaggggagcaaatgtggaggcccagtagctggcaaagtttagaagcagggggcaaaagctcctgcctgacttttcctgggtagctcctgggtcaaaatttcaggcaggatcccagggaaggggcaggcacccattgccacaggagagttgcaggcatgttgggatgtaggcctaggggaggtgctgcaggctcaagaaccaggcccacacattatatattaaaaaaaaaaaaacccacatttttttttattggtcagtgttggtaggagtttgttacaaaagtgagtccatgggcctgtggaatgtgaggggagtgggtccgctccaccagatgccagcaccggggccagtgcagctcagagccctgtggcggactacagggcctgcacagacggtcactcaaagaaagatgtccctgtgccctactccttggcgatggcaaagggcttctccacctcgatcttgccgcagtctgcgatgatcacatccttcaggggtttatcccggctgtctgtcttggtgctctccaccttccgcaccacctcctggaaaagaaaggtggaagcaggagggcatggtggatcaggaggtccaccgctcaggagaaaggccccagcgtatggctcaggagggctaagacccacaagtgatcaacagcacacaaaactggaggcaccaaaattctaacagactcctggccagagcagggagaatgcagatttgacgagggggtacaggaattttgttcctttgaagtaagacccaggttgggccaagggtgaggaggaggaagagggtgaccagggcatgtggcttctcagggacattgcgttcagctgcactctgtatacctcaggggtgggaccagcacgtcactgagtgaaggaggggagggaggctctggcagttgtgcagccttcctggctgggctctgagggggctggaagaatttagaaccttggaggcatggaggtacagggtttattctggacaggagcactgggctgcatctgtgggttgggtccttttgggaaagggatggacacatggagctcctgccctggggtctgtgttgaatccccggtgaggattgcccagtagtagcccttgcttccacaactcaccatgccctctagaactttgccaaacaccacatgcttgccatctagccaggctgtcttgactgtcgtgatgaagaactgggagccgttggtgtctttgcctgcgttggccatgctcacccagccaggcccgtagtgcttcagtttgaagttctcatcggggaagcgctcaccgtagatgctctttcctgggaaaaaagacagagcaggtcaggggcgctggattgcgccaaaccaagcagacattcggggccaggactgagggggcttaacctgtcctctgtgccaggctaggctggagtggactacaaggacataaaagcagcgtccttcctatcttctggcctcagagccaagccatgctgactgaggccaagtggggcatcaggccaggctgatgtggtgaacagctcacagaaggattactttgagaagatagttttgtggcttttaaataaggcgcatgttatcagctccccttagctatggcccaggcctgccacggagggactttggtggagggaagtgccgtgcaggatgcaggggagtcaacagggtcggaactctccagaaaaggaggactgctgtggctgaccagcctgttttcctatgagcacaaaagacacaggcatagctgcagaggagaaagcagccagagatgtgtggggaggggcagaaaagaggggctgccccttggattctggagagtcaaagcctcttaacaaggaatgaacaggaataaaagacagctgtgagtgtg

SEQ ID NO: 2716 - DNA, 6046 bp, Homo sapiens; identical to SEQ ID NO: 2095

SEQ ID NO: 2717 - DNA, 4866 bp, Homo sapiens
ctgtgggtctgtaggttaagggagaagatggcggcgctaggggaacccgtgcggctggagagagatatttgtagagcaattgaattattggaaaaactacaaaggagtggagaagtaccaccacagaaacttcaggctttgcaaagagtccttcaaagtgaattctgcaatgctgtgagagaggtatatgaacatgtctatgagactgtggacatcagtagcagtcctgaagtgagagcgaacgctactgcaaaggctactgttgctgcatttgctgccagtgaaggacattctcatcctcgagttgttgagctaccaaaaacagaagagggccttggattcaatattatgggaggcaaagaacaaaactctccaatctatatatcccgaataattccaggtggaattgctgatagacatgggggcctcaaacgtggagatcaactcctctctgttaatggagtgagtgttgaaggagaacatcatgaaaaagctgtagaactgctgaaagccgcacaaggaaaggttaaattagtggtacgatacacacccaaagtcttagaagaaatggagtcgcgctttgaaaaaatgagatcagcaaaacgcaggcaacagacctaatacatttcaaaacttgatatttcattttgcgttttagctagagaagttttccttgtgacttactaatggctgcaatgccaatgattgtaagaaaacaaacaaatttatcatgaaattctccttgtcattttataaatgcctattttaacatcatttatggttccagagatgcatacacttttttctgacaagaaaaagtaaaaggtgatgagggcaattctgtcctactgtttttacaggcctttttcaaatgcagattttgtcataaagttgttatagattttttaaaatgcttttttaatattaaaatgtacttttacattcttaatctttttttagaaaggaaaagttttcttcatttagctgctgatttaaaagtaaagttctccaattctttttttttgcttactctattttttttaacctgtgaaatttctttacagttttccaagaaattaagcataacagtctcatctacggcagttcattacactgtcaatgttaacatcattgctgcattttgtactttgaacacacacataatatatataaccagtggtaaatcatgactcagtacagtgcaagttttttcacttttacttaaacataatatataatggatattcatttatactgatttatgaaagtaagtttttaaacactgaaacaatcattgctaaaatacatattcttaatatttgagcattgaggcaagaggatgtaattgatagcattacttattacatccctatttatgttcaaccgtacatcaaattataaatgcaaaacaggttcagatttcatcttttgtgatttcttttaaatactattcatttttatttaaatgcacagtatttcccctatattttagtccttccattcctagagacaaaccagttatttggtggtgggaagtagctgaagcaaagaaggaaaagtaatacctttaacctcactagcttcaagagtagacattcttactagctcaatttaaataattgattttaaataggaagaaaagaggatatatttaagatacatagaaattatgatgtgaagtattcatgagaatctgtagattccatcaaaataagtaggaactcatactaaaattgttggatttaaagaggcaacttttgtttatgattcaaatatgggaatttgagaaatatttcatttgtccactggatgtcactattttactaaaaggcagctattagtgtgggactgtgactgaggtcttaaagactgaaagagttggggttcattttctgttacaacttacaggaacatttgtactttaagaaaaatttaagtgacaaatgttagaagatgatggattgaaaaatataagtaatttggcatattgaccctatataaaaaagtgggcattttgtaacattccttcaggaagaatagaattgtatgcttttttctgcatgtttgtgatcactgtgagtctcagatgattattccagttttcaatgatttttcaaaataaaagtcaatcagcattgttatttatcattaaggtattgaacactggattgcatggttgaatgtgtctttaatccactacaaaatgtgcttgttattgataggatcatgttgttaaattgtaaattttcaaaattaattgatgttttaaaaatgttgagaccaaagtagtatagaagtatggacttaatttaattgtaaaattattagaggtatttgttgtagagctttatatattaaagagaggtattggtgcatataaaaacagtaatattattgttatgcttgtattcttgcatttcagggtaagtaaaccctgaagaaatcttattttagtatagctacagctgcagtagcttttaagtatgtatcaacatttcattataaattatagcttcctggttctgtgtctcagctgtttcagaactttcagccaagttaaatcttttttggtgttgaaacttttagtaagttgagtaagctatttttttccctacggtaatccacaatctgttctttgtgtgggttgacacctatttataattcttaaaataagggtagctcaaaggagccaagtacagtagtttagcttgctactgttgagcatgaatagcagtaggttgttttcattaatgcagttttcataatgtatcccagaattttaaatcttgaccatagaaaaatacagtcattcattggcaaagatgtacagtggtggtttagtgcagtgaggaaatgatgggaatttttatcttagaaatggatgattcgtgaataaaactaggtacatagtaagtgtatgatagatgtttgatttgtaaattacaaatataaattatcacccccatttccatttattttcttgatatatcaaaatgtgttgacttagtgattctcaatcttagctacatattagcctggcagagctttaaaaaattgatacctgggtcctattccataacaactaaatcaaaatcacccttttttttttttttgtaaagctttccaggtggttctaaaggacacctagggtcaataacccattataaaatgatctgattacactggacactcttaggaagtatcaaaatagaacagttcaatttgcagctacttaatgattaattacatttcttaggttttttttttgttttttttttggtttgtttgttttttgttttaaaagagacaggatcttgctttgtctcccaggctggaacacagtggtgtgatcatagctcactgcagcctgaaactccttggcttccacctcagcctcccaaagcattaggattataggcgtgagccactgcacctggccaagtaatttcttttaggaataaaaggtacttggcattccttatttgggaagtaattacagtcttatctttttttttcttttttcttttttttaataaaatctaccagtaatttaaatgtgagctttttatgtctgtcatcattctgccccctttgcctttaaaacttacaaaaatacgtgtttgttatttgagaaagcatgtttaaaaattgcagatgagaaatattgtcgttaataattatgtactgtcttaatgtgggcacttcatttgttagtataatactagataatagcagcctagttctttaggatttgacgattcaaattttttttttgttttttgtttttgtttttttttgagacagagtcttgctctgttgcccaggctggcgtgcagtggtgtgatctcggctcacttcagcctccgccacctcaaggcagttcaagcaattctcctgcctcagcctcccgagtagctaggactacaggcgtgtgccacctctcccggctaatttttttgtatttttagtagagacggggtttcaccgtgttagccaggatgatctcgatctcctgacctcgtgattcgcccgcctcggcctcccaaagtgctggaattactggcgtgagccaccatgcccagcctcaaatatgtttttaaaaaatatcattgtcctcctcctcttaagatttttttaagttattttgctcaagtacttaagtagtctggctcaagtactttgtttacaattaaaatggatattatagcatttaatagaagaaatggttatggcttatccaaaaagaatgtcagcatgacctggtgtagacttaaaaaactacatgtttgtgaatattttataatgtggaatgatcattgaaatatcaaggattctagtaattgtatttcctgaataaatgtatgtttatgaattttctaacttacattttgttgtgtcctctgccaacaatctggttttataattgttgtctaaagtttgctagtagtgtttcttcaaaggttattccaggtatggttaagtagtgagaaaaatcacttattaattttcaagaactttgagactaatttgtattgactcggttttttaaaataactggcaaatgctatgcttctacttttaaaatttgtggtaatacccagaatggatgtaaaataacatttttcaatagattacttcatttatcaatttaattctgattttaaggcttatttaaaataaatttgtatgagttatgtcctcgttctttggatttgaaaaaagttgatataactacacaatagataacgtttatgaaaggtatgtataaaaaaacataattcctggtggctgctgaaatgaaactttgaatttctatattttgctttgtctttcataaaatttaaagaaaacaaaaaaaaaaaaaaa

SEQ ID NO: 2718 - DNA, 5021 bp, Homo sapiens
agcacgaaaggccacgcaggccgttctaaccctggcggccaagaggaggggtagcaggctctggaacctgcgggcggggacgaagacggcgcgcgacgatgtcgcaccgcggcgtgcgcggtgtcggcagtagctgcggcgcaggggcggagcgaaggctgcggcggcgtcgggtacgcgcacacgttgcatcttcttcctttcgcggggtcctccgtagttctggcacgagccaggcgtactgacaggtggaccagcggactggtggagatggcgacgctctctctgaccgtgaattcaggagaccctccgctaggagctttgctggcagtagaacacgtgaaagacgatgtcagcatttccgttgaagaagggaaagagaatattcttcatgtttctgaaaatgtgatattcacagatgtgaattctatacttcgctacttggctagagttgcaactacagctgggttatatggctctaatctgatggaacatactgagattgatcactggttggagttcagtgctacaaaattatcttcatgtgattcctttacttctacaattaatgaactcaatcattgcctgtctctgagaacatacttagttggaaactccttgagtttagcagatttatgtgtttgggccaccctaaaaggaaatgctgcctggcaagaacagttgaaacagaagaaagctccagttcatgtaaaacgttggtttggctttcttgaagcccagcaggccttccagtcagtaggtaccaagtgggatgtttcaacaaccaaagctcgagtggcacctgagaaaaagcaagatgttgggaaatttgttgagcttccaggtgcggagatgggaaaggttaccgtcagatttcctccagaggccagtggttacttacacattgggcatgcaaaagctgctcttctgaaccagcactaccaggttaactttaaagggaaactgatcatgagatttgatgacacaaatcctgaaaaagaaaaggaagattttgagaaggttatcttggaagatgttgcaatgttgcatatcaaaccagatcaatttacttatacttcggatcattttgaaactataatgaagtatgcagagaagctaattcaagaagggaaggcttatgtggatgatactcctgctgaacagatgaaagcagaacgtgagcagaggatagactctaaacatagaaaaaaccctattgagaagaatctacaaatgtgggaagaaatgaaaaaagggagccagtttggtcagtcctgttgtttgcgagcaaaaattgacatgagtagtaacaatggatgcatgagagatccaaccctttatcgctgcaaaattcaaccacatccaagaactggaaataaatacaatgtttatccaacatatgattttgcctgccccatagttgacagcatcgaaggtgttacacatgccctgagaacaacagaataccatgacagagatgagcagttttactggattattgaagctttaggcataagaaaaccatatatttgggaatatagtcggctaaatctcaacaacacagtgctatccaaaagaaaactcacatggtttgtcaatgaaggactagtagatggatgggatgacccaagatttcctacggttcgtggtgtactgagaagagggatgacagttgaaggactgaaacagtttattgctgctcagggctcctcacgttcagtcgtgaacatggagtgggacaaaatctgggcgtttaacaaaaaggttattgacccagtggctccacgatatgttgcattactgaagaaagaagtgatcccagtgaatgtacctgaagctcaggaggagatgaaagaagtagccaaacacccaaagaatcctgaggttggcttgaagcctgtgtggtatagtcccaaagttttcattgaaggtgctgatgcagagactttttcggagggtgagatggttacatttataaattggggcaacctcaacattacaaaaatacacaaaaatgcagatggaaaaatcatatctcttgatgcaaagttgaatttggaaaacaaagactacaagaaaaccactaaggtcacttggcttgcagagactacacatgctcttcctattccagtaatctgtgtcacttatgagcacttgatcacaaagccagtgctaggaaaagacgaggactttaagcagtatgtcaacaagaacagtaagcatgaagagctaatgctaggggatccctgccttaaggatttgaaaaaaggagatattatacaactccagagaagaggattcttcatatgtgatcaaccttatgaacctgttagcccatatagttgcaaggaagccccgtgtgttttgatatacattcctgatgggcacacaaaggaaatgccaacatcagggtcaaaggaaaagaccaaagtagaagccacaaaaaatgagacctctgctccttttaaggaaagaccaacaccttctctgaataataattgtactacatctgaggattccttggtcctttacaatagagtggctgttcaaggagatgtggttcgtgaattaaaagccaagaaagcaccaaaggaagatgtagatgcagctgtaaaacagcttttgtctttgaaagctgaatataaggagaaaactggccaggaatataaacctggaaaccctcctgctgaaataggacagaatatttcttctaattcctcagcaagtattctggaaagtaaatctctgtatgatgaagttgctgcacaaggggaggtggttcgtaagctaaaagctgaaaaatcccctaaggctaaaataaatgaagctgtagaatgcttactgtccctgaaggctcagtataaagaaaaaactgggaaggagtacatacctggtcagcccccattatctcaaagttcggattcaagcccaaccagaaattctgaacctgctggtttagaaacaccagaagcgaaagtactttttgacaaagtagcttctcaaggggaagtagttcggaaacttaaaactgaaaaagcccctaaggatcaagtagatatagctgttcaagaactccttcagctaaaggcacagtacaagtctttgataggagtagagtataagcctgtgtcggccactggagctgaggacaaagataagaagaagaaagaaaaagaaaataaatctgaaaagcagaataagcctcagaaacaaaatgatggccaaaggaaagacccttctaaaaaccaaggaggtgggctctcatcaagtggagcaggagaagggcaggggcctaagaaacagaccaggttgggtcttgaggcaaaaaaagaagaaaatcttgctgattggtattctcaggtcatcacaaagtcagaaatgattgaataccatgacataagtggctgttatattcttcgtccctgggcctatgccatttgggaagccatcaaggacttttttgatgctgagatcaagaaacttggtgttgaaaactgctacttccccatgtttgtgtctcaaagtgcattagagaaagagaagactcatgttgctgactttgccccagaggttgcttgggttacaagatctggcaaaaccgagctggcagaaccaattgccattcgtcctactagtgaaacagtaatgtatcctgcatatgcaaaatgggtacagtcacacagagacctgcccatcaagctcaatcagtggtgcaatgtggtgcgttgggaattcaagcatcctcagcctttcctacgtactcgtgaatttctttggcaggaagggcacagtgcttttgctaccatggaagaggcagcggaagaggtcttgcagatacttgacttatatgctcaggtatatgaagaactcctggcaattcctgttgttaaaggaagaaagacggaaaaggaaaaatttgcaggaggagactatacaactacaatagaagcatttatatctgctagtggaagagctatccagggaggaacatcacatcatttagggcagaatttttccaaaatgtttgaaatcgtttttgaagatccaaagataccaggagagaagcaatttgcctatcaaaactcctggggcctgacaactcgaactattggtgttatgaccatggttcatggggacaacatgggtttagtattaccaccccgtgtagcatgtgttcaggtggtgattattccttgtggcattaccaatgcactttctgaagaagacaaagaagcgctgattgcaaaatgcaatgattatcgaaggcgattactcagtgttaacatccgcgttagagctgatttacgagataattattctccaggttggaaattcaatcactgggagctcaagggagttcccattagacttgaagttgggccacgtgatatgaagagctgtcagtttgtagccgtcagacgagatactggagaaaagctgacagttgctgaaaatgaggcagagactaaacttcaagctattttggaagacatccaggtcacccttttcacaagggcttctgaagaccttaagactcatatggttgtggctaatacaatggaagactttcagaagatactagattctggaaagattgttcagattccattctgtggggaaattgactgtgaggactggatcaaaaagaccactgccagggatcaagatcttgaacctggtgctccatccatgggagctaaaagcctttgcatccccttcaaaccactctgtgaactgcagcctggagccaaatgtgtctgtggcaagaaccctgccaagtactacaccttatttggtcgcagctactgagggatgaacgaaagccccctcttcaactcctctcactttttaaagcattgatattagtatcttctcagatacagaccgttttatgattttttaaaaagtaaaagttctaaaatgaagtcacacaggacaattattcttatgcctaagttaacagtggataaaagacttttctgtaaacaactccagtaataaatatcatgaactaaaaaaaa

SEQ ID NO: 2719 - DNA, 5980 bp, Homo sapiens; identical to SEQ ID NO: 2363

SEQ ID NO: 2720 - DNA, 1405 bp, Homo sapiens; identical to SEQ ID NO: 2313

SEQ ID NO: 2721 - DNA, 7191 bp, Homo sapiens
gcgcgcgcgcgggcgggagcggagggcaacggggcggcgcgggcggccgggcgcagggtcgcgggaggtgacgcgcggcgaggatggcggcgcggggccgggggctgctgctgctgacgctgtcggtgctgttggcggcgggcccctccgccgctgcggccaagctcaacatccccaaagtgctgctgcccttcacgcgggccacgcgcgttaacttcacgctggaggcctcggagggctgctaccgctggttgtccacccggccggaggtggccagcatcgagccgctgggcctggacgagcagcagtgctcccagaaggcagtggtgcaggcccgcctgacccagcctgcccgcctcaccagcatcatcttcgcagaggacatcaccacaggccaggtcctgcgctgtgatgccattgtggacctcatccatgacatccagatcgtctccaccacccgcgagctctacctggaggactcccccctggagctgaagatccaggccctggactccgaagggaacaccttcagcactctggctggactggtcttcgagtggacgattgtgaaggactccgaggcggacaggttctcagactcccacaatgcgctgcgaatcctcactttcttggagtctacgtacatccctccttcttacatctcagagatggagaaggctgccaagcaaggggacaccatcctggtgtctgggatgaagaccgggagctccaagctcaaggctcgcatccaggaggctgtctacaagaatgtacgccctgcagaagtcaggctgctgattttggaaaacatccttctgaacccggcctatgacgtctacctgatggtgggaacctccattcactacaaggtgcagaagatcaggcaagggaaaattacagaactctccatgccttccgatcagtacgagttgcagcttcagaacagcatcccgggccccgaaggagacccagcccggccggtggctgtcttggcccaggacacgtcgatggtcactgcactgcagctgggacagagcagcctcgtccttggccacaggagtattcgcatgcaaggtgcttctaggttacccaacagcactatctacgtggtcgaacctggatacctagggttcactgttcaccctggtgacaggtgggtgctggagaccggccgcctgtatgaaatcaccatcgaagtttttgacaagttcagcaacaaggtctatgtatctgacaacatccgaattgaaactgtgcttcctgctgagttcttcgaggtgctctcgtcctcccagaatgggtcataccatcgcatcagggcactaaagaggggacagacggccattgacgcggccctcacctctgtggtggaccaggatggaggggtccacatactacaggtgcctgtgtggaaccagcaggaggtggaaattcacatcccgatcaccctgtatcccagcatcttgacatttccgtggcaaccaaagacgggcgcctatcagtacacaataagggcccacggtggcagtgggaacttcagctggtcttcgtcaagccacctggttgccacagttactgtcaagggcgtgatgaccacaggcagtgacatcgggttcagtgtgatccaggcacatgatgtgcagaacccactccatttcggtgagatgaaggtgtatgtgatcgagccccacagcatggagtttgccccgtgccaggtggaggcacgtgtgggccaggccctggagctgcccctgaggatcagtggcctcatgcccggcggggccagtgaggtggtcaccttgagcgactgctcccactttgacttggctgtcgaggtggagaaccagggtgtgttccagccactcccagggaggctgccgccaggctctgagcactgcagcggcatccgggtaaaggccgaggcccagggctctaccacgcttcttgtgagctacagacacggccacgtccacctgagtgccaagatcaccattgctgcctacctgcccctcaaggctgtggatccctcctctgttgccttggtaaccctgggctcctcaaaggagatgctgtttgaaggaggtcccagaccttggatcctcgagccgtccaaattcttccagaacgtcaccgctgaggacactgacagcatcggcctggctctctttgccccccattcctcccggaattatcagcaacactggatccttgtgacctgtcaggccttgggtgagcaggtcatcgccctgtcggtggggaacaagcccagcctcaccaacccctttcctgcggtggagcctgccgtggtgaagttcgtctgcgccccaccgtccaggctcaccctcgcgcctgtctacaccagcccccagctggacatgtcctgtccgctgctgcagcagaacaagcaggtggtcccagtgtccagccaccgcaacccccggctggacctggctgcttacgaccaggagggccgccggttcgacaacttcagctctctgagcatccagtgggagtccaccaggccagtgttggccagcatcgagcctgagctgcccatgcagctggtgtcccaggacgatgagagtggccaaaagaagctgcacggtttgcaggccattttggttcacgaggcatcaggaaccacagccatcactgccactgccactggctaccaggagtcccacctcagctctgccagaacaaagcagccgcatgaccctctggtgcctctgtcggcctccatagagctcatcctggtggaggacgtgagggtgagcccagaagaggtgaccatctacaaccaccctggcatccaggcagagctccgcatcagggaaggctcaggttacttcttcctcaacaccagcaccgcagatgttgtcaaggtggcctaccaggaggccaggggtgtcgccatggtgcaccctttgctcccgggctcatccaccatcatgatccatgacttgtgcctcgtcttcccggccccagccaaggctgtcgtttacgtgtcggacattcaggagctgtacatccgtgtggttgacaaggtggagattgggaagacagtgaaggcatacgtccgcgtgctggacttgcacaagaagcccttccttgccaaatacttcccctttatggacctgaagctccgagcagcctccccgatcattacattggtggcccttgatgaagcccttgacaactacaccatcacattcctcatccgcggtgtggccatcggccagaccagtctaactgcaagtgtgaccaataaagctggacagagaatcaactcagccccacaacagattgaagtctttcccccgttcaggctgatgcccaggaaggtgacactgcttatcggggccacgatgcaggtcacctccgagggcggcccccagcctcagtccaacatccttttctccatcagcaatgagagcgttgcgctggtgagcgctgctgggctggtacagggcctcgccatcgggaacggcactgtgtctgggctcgtgcaggcagtggatgcagagaccggcaaggtggtcatcatctctcaggacctcgtgcaggtggaggtgctgctgctaagggccgtgaggatccgcgcccccatcatgcggatgaggacgggcacccagatgcccatctatgtcaccggcatcaccaaccaccagaaccctttctcctttggcaatgccgtgccaggcctgaccttccactggtctgtcaccaagcgggacgtcctggacctccgagggcggcaccacgaggcgtcgatccgactcccgtcacagtacaactttgccatgaacgtgctcggccgggtaaaaggccggaccgggctgagggtggtggtcaaggctgtggaccccacatcggggcagctgtatggcctggccagagaactctcggatgagatccaagtccaggtgtttgagaagctgcagctgctcaaccctgaaatagaagcagaacaaatattaatgtcgcccaactcatatataaagctgcagacaaacagggatggtgcagcctctctgagctaccgcgtcctggatggacccgaaaaggttccagttgtgcatgttgatgagaaaggctttctagcatcagggtctatgatcgggacatccaccatcgaagtgattgcacaagagccctttggggccaaccaaaccatcattgttgctgtaaaggtatcccctgtttcctacctgagggtttccatgagccctgtcctgcacacccagaacaaggaggccctggtggccgtgcctttgggaatgaccgtgaccttcactgtccacttccacgacaactctggagatgtcttccatgctcacagttcggtcctcaactttgccactaacagagacgactttgtgcagatcgggaagggccccaccaacaacacctgcgttgtccgcacagtcagcgtgggcctgacactgctccgtgtgtgggacgcagagcacccgggcctctcggacttcatgcccctgcctgtcctacaggccatctccccagagctgtctggggccatggtggtgggggacgtgctctgtctggccactgttctgaccagcctggaaggcctctcaggaacctggagctcctcagccaacagcatcctccacatcgaccccaagacgggtgtggctgtggcccgggccgtgggatccgtgacggtttactatgaggtcgctgggcacctgaggacctacaaggaggtggtggtcagcgtccctcagaggatcatggcccgtcacctccaccccatccagaccagcttccaggaggctacagcctccaaagtgattgttgccgtgggagacagaagctctaacctgagaggcgagtgcacccccacccagagggaagtcatccaggccttgcacccagagaccctcatcagctgccagtcccagttcaagccggccgtctttgatttcccatctcaagatgtgttcaccgtggagccacagtttgacactgctctcggccagtacttctgctcaatcacaatgcacaggctgacggacaagcagcggaagcacctgagcatgaagaagacagctctggtggtcagtgcctccctctccagcagccacttctccacagagcaggtgggggccgaggtgcccttcagcccaggtctcttcgccgaccaggctgaaatccttttgagcaaccactacaccagttccgagatcagggtctttggtgccccggaggttctggagaacttggaggtgaaatccgggtccccggccgtgctggcattcgcaaaggagaagtcttttgggtggcccagcttcatcacatacacggtcggcgtcttggaccccgcggctggcagccaagggcctctgtccactaccctgaccttctccagccccgtgaccaaccaagccattgccatcccagtgacagtggcttttgtggtggatcgccgtgggcccggtccttatggagccagcctcttccagcacttcctggattcctaccaggtcatgttcttcacgctcttcgccctgttggctgggacagcggtcatgatcatagcctaccacactgtctgcacgccccgggatcttgctgtgcctgcagccctcacgcctcgagccagccctggacacagcccccactatttcgctgcctcatcacccacatctcccaatgcattgcctcctgctcgcaaagccagccctccctcagggctgtggagcccagcctatgcctcccactaggccgcgtgaaggttcccggaggatgggtctcagccgagcctcgtgcacccccaagatggaacatccctgctgcattcacactggaacaagcccctccagatgagtgccccggccccaggccagcttcactgccgtctcttcacacagagctgtagtttcggctctgcccattagctcattttatgtaggagttttaaatgtgtgtttttttcctttcaagtcttacaaagctaagactttttggctcattcctttttgcatggttgtctagggtttctggacaatgtgctgttgcatttttattttcctagccttgctaaaatctttcccttctcaagactttgagcagttagaagtgctctttagaagttgtctgtgggtgatgttactgtagtggtctcagggaaaggattgtccagttactttagggggtttttggtggggtttttccccctgtgaaaacttactttgcccctagtctggctgctgctaggacttctgaggagcaatgggacatgagtgtccctgtatctgcgccactgccgcaagggaagcctcaggaaccagcacctggaggccaggatagccaagccctgggtgagcgagaggctggagaacacaggagctcacccagggctgctgcccaaccatgggccactgtgaacagacttcagtcctctgtttttgtttcataagccgttgagacatctgatggacttggcttaggccctgctgggacatcccacgtgtgatccctttcactccatcaggacaccaggactgtccttaggaaaatgtccttgagatggcagcaggagtcatattttctgtgtgtgtgtttcggaaagccgctgtgtcctgcctcagcacaaagacccagtgtcatttgctcctcctgttcctgtgccactccagaacctcagcagatctgagccaccgcctgccagtgtgagaggcggccactttcatggcagctcatcaggcgcagggccccagacagcttcccagcaggccctagagcccggcctgggccaatgatggagggcggccgccagcccagggcctgcccatccagaagggactccccagggcctgggggaggagacccttggaaaagtcctctcttcccagctcctgattctggatctgagattctcagatcacaggcccctgtgctccaggccgaggctgggctaccctcagggagatccagagactcatgcccatggccatccatgcgtggacgctgtgtggagagtccaggatgacgggatcccgcacaagctcccttcagtccttcagggctgggccatgtggttgatttttctaaagctggagaaaggaagaattgtgccttgcatattacttgagcttaaactgacaacctggatgtaaataggagcctttctactggtttatttaataaagttctatgtgatttttt

SEQ ID NO: 2722 - DNA, 1395 bp, Homo sapiens
gggccgccggctgccagcccagggcggggcggagccctacttctggccgaccgcgtaggcggtgcttgaacttagggctgcttgtggctgggcactcgcgcagaggccggcccgacgagccatggttgctgggagcgacgcggggcgggccctgggggtcctcagcgtggtctgcctgctgcactgctttggtttcatcagctgtttttcccaacaaatatatggtgttgtgtatgggaatgtaactttccatgtaccaagcaatgtgcctttaaaagaggtcctatggaaaaaacaaaaggataaagttgcagaactggaaaattctgaattcagagctttctcatcttttaaaaatagggtttatttagacactgtgtcaggtagcctcactatctacaacttaacatcatcagatgaagatgagtatgaaatggaatcgccaaatattactgataccatgaagttctttctttatgtgcttgagtctcttccatctcccacactaacttgtgcattgactaatggaagcattgaagtccaatgcatgataccagagcattacaacagccatcgaggacttataatgtactcatgggattgtcctatggagcaatgtaaacgtaactcaaccagtatatattttaagatggaaaatgatcttccacaaaaaatacagtgtactcttagcaatccattatttaatacaacatcatcaatcattttgacaacctgtatcccaagcagcggtcattcaagacacagatatgcacttatacccataccattagcagtaattacaacatgtattgtgctgtatatgaatggtattctgaaatgtgacagaaaaccagacagaaccaagtaagtacactgcaggctgtgcactctgtgccagaacaacagcagccctgctgtagatgcccattacttgggaagccagattgtactcatctgttggttgccttgtacagtaataagaagtaacatcagcagatatactaaccatagtgtattaagtaccaactgtgtgccatgcactgcactagccactctctgcatatcgtttcctggaaccctctcaatgagccttgcaggaggagtatcataccccttgcttagagacagcgcatatgagattcatagaagtcaagtgagatatcaaagtcacgttgctagtaagtgatgggctgggatttaaatctaggtctttggactccaagagttatactgttaaccactacaatacactccctccacctcccatcccagaaaaagttggatcagggatagggttcacttcaggagccagggtcagagctgggcctgtagtcacatataaaagataggacacaaacacaattagcagcagtgttggtttaataaaccgccgta

SEQ ID NO: 2723 - DNA, 2553 bp, Homo sapiens
tggttgcgtcgggtcacgtgggcgcgcaggcgcagcgcggtgcagcccgttcgctcacacaaagcccagacgcggagaaaatggcggcaggggtcgaagcggcggcggaggtggcggcgacggagatcaaaatggaggaagagagcggcgcgcccggcgtgccgagcggcaacggggctccgggccctaagggtgaaggagaacgacctgctcagaatgagaagaggaaggagaaaaacataaaaagaggaggcaatcgctttgagccatatgccaatccaactaaaagatacagagccttcattacaaacataccttttgatgtgaaatggcagtcacttaaagacctggttaaagaaaaagttggtgaggtaacatacgtggagctcttaatggacgctgaaggaaagtcaaggggatgtgctgttgttgaattcaagatggaagagagcatgaaaaaagctgcggaagtcctaaacaagcatagtctgagcggaagaccactgaaagtcaaagaagatcctgatggtgaacatgccaggagagcaatgcaaaaggtgatggctacgactggtgggatgggtatgggaccaggtggcccaggaatgattactatcccacccagtatcctaaataatcccaacatcccaaatgagattatccatgcattacaggctggaagacttggaagcacagtatttgtagcaaatctggattataaagttggctggaagaaactgaaggaagtatttagtatggctggtgtggtggtccgagcagacattcttgaagataaagatggaaaaagtcgtggaataggcactgttacttttgaacagtccattgaagctgtgcaagctatatctatgttcaatggccagctgctatttgatagaccaatgcacgtcaagatggatgagagggccttaccaaaaggagatttcttccctcctgagcgtccacaacaacttccccatggccttggtggtattggcatggggttaggaccaggagggcaacccattgatgccaatcacctgaataaaggcatcggaatgggaaacataggtcccgcaggaatgggaatggaaggcataggatttggaataaataaaatgggaggaatggaggggccctttggtggtggtatggaaaacatgggtcgatttggatctgggatgaacatgggcaggataaatgaaatcctaagtaatgcactgaagagaggagagatcattgcaaagcagggaggaggtggaggtggaggaagcgtccctgggatcgagaggatgggtcctggcattgaccgcctcgggggtgccggcatggagcgcatgggcgcgggcctgggccacggcatggatcgcgtgggctccgagatcgagcgcatgggcctggtcatggaccgcatgggctccgtggagcgcatgggctccggcattgagcgcatgggcccgctgggcctcgaccacatggcctccagcattgagcgcatgggccagaccatggagcgcattggctctggcgtggagcgcatgggtgccggcatgggcttcggccttgagcgcatggccgctcccatcgaccgtgtgggccagaccattgagcgcatgggctctggcgtggagcgcatgggccctgccatcgagcgcatgggcctgagcatggagcgcatggtgcccgcaggtatgggagctggcctggagcgcatgggccccgtgatggatcgcatggccaccggcctggagcgcatgggcgccaacaatctggagcggatgggcctggagcgcatgggcgccaacagcctcgagcgcatgggcctggagcgcatgggtgccaacagcctcgagcgcatgggccctgccatgggcccggccctgggcgctggcattgagcgcatgggcctggccatgggtggcggtggcggtgccagctttgaccgtgccatcgagatggagcgtggcaacttcggaggaagcttcgcaggttcctttggtggagctggaggccatgctcctggggtggccaggaaggcctgccagatatttgtgagaaatctgccattcgatttcacatggaagatgctaaaggacaaattcaacgagtgcggccacgtgctgtacgccgacatcaagatggagaatgggaagtccaaggggtgtggcgtggttaagttcgagtcgccagaggtggccgagagagcctgccggatgatgaatggcatgaagctgagtggccgagagattgacgttcgaattgatagaaacgcttaagcagttgccttttttaaacatcgatacgagacctctgaatttgtattttttcttgttaaccattttaatttgttggctggatgtataaagatgtttaaaaaattcagttgctttttggggtaatttgaattacttttttaatgactggggttccatttgactgtttgcattgagattgcaatgtgcgcaattttttttgtagttgtggcatcttgttgacatcgaatatgactttgataataaataccggttcctgaaaaaaaaaaaaaaaaaaaaaaaa

SEQ ID NO: 2724 - DNA, 4941 bp, Homo sapiens; identical to SEQ ID NO: 2111

SEQ ID NO: 2725 - DNA, 6342 bp, Homo sapiens
cgccgctcaggccctggagcggacggttcctactgcggctgggcaccggctccgctcccgcgtctgcccgcgctccagctgcgcctggcccggccccggcccggctcggcgtggccccggcctccaagcgaaggcgccgctgccgctgggccgctcccagggccatgaggaagcggcggcagccactgcggcccgcgtcaaggacttctccagacaggttatgttacctgcagaggctgccctgaagctccctgtggcctggagactatgtacaagaggaatggtctgatggctagcgtgttggtcacctctgccactccacagggcagcagcagctcggactctctggagggccagagctgcgactatgccagcaagagctatgatgccgttgtcttcgatgtcttgaaagtgaccccagaggagtttgctagccagattacattaatggatatacctgtgtttaaagctatccagccggaggaactagccagctgtggatggagtaagaaggagaaacacagtcttgcccctaacgttgtggcctttacccggaggtttaaccaggtcagtttttgggttgtacgagaaattctaacagcacagactttaaaaataagggcagaaatcctcagccattttgtgaaaatagccaagaaacttctagaactcaacaaccttcattctctcatgtctgtggtatcagcattacaaagtgctcccatcttcaggctgacaaaaacctgggctcttttaaatcgaaaagacaagactacctttgagaaattggactacctgatgtcgaaagaagataattacaagcggacacgggaatatatccgaagcctgaagatggttccaagtattccctatctaggaatctatcttctggatttaatctacattgattctgcatatcctgcctcaggcagtatcatggaaaatgaacaaagatccaatcagatgaacaatattcttcgaataattgctgatttacaagtttcctgcagctatgatcacctcaccaccctgccccatgtgcagaagtacctgaagtccgtacgctacattgaagagctccagaagtttgtggaagacgacaactacaaactgtcgctcagaatcgaaccaggaagcagctctccaagactagtctcttccaaggaagatcttgcaggtccctctgctggctccggttctgcgaggttcagccggaggcccacctgtcctgacacatctgttgctggcagcctccccacacctccagtccccagacacaggaagagccacagcctaggcaacaatatgatgtgtcagttgagtgtagttgagagtaaaagtgcgacattcccatcggagaaagcaaggcacctactggacgacagtgtcctagagtcccgcagcccccgaaggggcctggctctgacctcctcctctgctgtcaccaatggactctccctaggcagtagtgagagctcagagtttagtgaagagatgtcttcagggctggaaagccccaccggcccgtgcatctgttctctggggaactccgcagctgtgcccaccatggaggggcctctgagaagaaaaaccctgctcaaggaagggcggaagcctgcgctgtcctcgtggaccaggtactgggtcatactctcaggatccaccctcctgtactacggagccaagtccttgcggggcacagacagaaaacactataaatccacacctggcaaaaaggtttccatcgtgggctggatggtgcagctgcccgatgaccccgagcacccagatatcttccagctgaacaaccctgacaaaggcaatgtttacaagtttcagactggttcccgatttcatgcaatactgtggcacaagcatttggatgatgcatgtaaaagcaacaggcctcaggtacctgcaaaccttatgtcatttgagtaagtctctgcaggacgtggcatgacttcagaggcttctgggaacccaggctgggcctggtggtgaagagcagtcctgggcacaggctgtgagccagggtgctgggaaactcacagctggactcaggggacacggcctgtggcctcaccatcccagagggcttcaccagtgtgggatccacctgtcagtccccagcgactctcatgacactcattctgcagcaccgcctcttggggcagtggtcagaccccacacgccctctctgggcccaccacctgcatctgcgactagagagcacccggcccacgttgggttctcagtgctttctactgcacagagtggacagcgctaactaacctgtgagaggggcccgagagaaggaacagctgtggaacaggctttttacaccccaagtgcatggggttgctcgcccacagggctgcctcagattttgtacaaccccgaagcgtcctctgcgtgtgcgtgctgtacgtgtgtgtgtgtgtgtgagcgagtgtgaactcttcaagaaacatgcattttggcacaagactcgtgacatcacacacttcattcgctttgaggccctgctttaaccttaagttatagccctgtccaccgaggaaggtcagggtgagagcctagattcctcctgtgtcaagggtccctcgcattcttttactgtaaacaaacaatgccttaaattgtgtcttgttttctgttcctatgggtgctattcatctggaaggcctgcttccaggcctctttgctgtcagcccttctgagacaggacctggcttcaggactgtggactgggctgctggcctgcttgcttcctcccttccccattcctagcagggcctgaggccctcctcttctcgcccttcccaccatgccagaatgggaagttgtgacgttgcagctccaaccgacgtgctcatagtgatcagctgtgcaggagccatgaggcaccaacctctccccgcagggcaaagcctgtgcccccatcatctcactcctttgcctgcactgccagggtggggcccaccaagattcctgatcatgacgggaagctgagtgaccctgaggccttaagcttccccagtcttggccccaaatgcagtcaccagcaagttttccattttccaagtccaagggcacaattgttgatgaccgtgtgacaatagagcgaagccccggggagtgaacggtccaacctctgcattcagttaggagctcttcacatgaatcacatccttatctgtcaccttgtgtcacattttaaagtgacttttattttgcacaaataatttttattcagaataataaatcactctttatcatagtatcttctcttccctcttcccctttagtttggatagcctaactctgagaagttaacccttaaacagttttctggaagagactgaatttctgggtccttgcagctgtgatggtttcagagctcagactgatcaggcatcaagctaccctcaagagtttctgggctggatgtttcagaacaacatctacaccagtaaagtgtaataggtcagtttcaaaacgaccaaaagacccaccactgtattttgaccaaataatgacaacttctttagaaatttgaatggcttggtgaggaaagtagttgtcaccagggcctcattttgtagttgagccttacaatgcttagtagttcatcttctttttgagcaaagactagaatactttcctcctaagagaaactcccaggtgataaaagttgatgccatcaaaccttgacaccgggtgctctgcacacccacgcggatgttgcacctcattctcccgatgactattcaaatcagcatctagaggctgaatgacaatgccaaacactccacctctgatcagaaccatgcagtgttaacactttaacctacattgaatctgattctacctgttaacttttaaaaagtcgtaagtttggatgaaagtgcaagatgtggaacatcaactacctattttccttgggtttttccactctgcaaactgtcctggtttttcacaccaatgaagtattatagatgccaatccaaaacctcagaatttcaggcaccacaaaaacaggtaattttctatcccttataagtttgtcttttctttcagaaacatctcttagcctaatttgaaatagcacaatcacaattcaaaatgtttagtcttctcactaattgagtctgcttccacgtcctctcccaggaacattcttagctcggactcttgaagaatctctttagattttgttggcaaaagccttatagaagcagtaagaggcttgaccacgccggaagagtcctggagctaaagctggaagacactcagctctctaagcaggggctcggccaaacatgggagttaagtgctgcttgtcttcccagtgttggtttgaaccctgtgagcctgagacagagagggccaggcaccaaccacaaggcgggaaagtccatgggtagaccctccccctggagggaagcatttctagtttttgctccttgactgtccagagtgtacaaatgttcataacgccattgaagggattatttcttgcatgcatatgctgaatttttttaagcaaatggatcatggcaccccaaaatgaaagttatagaaagctgtctacaactgtggagttggtagctggtaacattgttgtctcaagaacaactcacctctctccctaggactaatttttgtctctctcagttgaacatgttttgtcattcaagatcagtcaggtgcattctggcaactgacatacttgatggaggattgattcggtagagagcagtagaaatcttgttctaactgtgcctggtgagagactttggccccctccctccctataaggctgtggaacctgaggaagtagatacttgaagagattctgtttaggaagaaactcactctcttttgccagttgaatttatagagcattttttttcttaccaagatggccagtatcattttacccccacctcccaagccccaagaggtgtaccttttcagatgccattttacaggcggaaatgctccatgaaacaggaagccacttgcaagcaacatctgctctgttcctcaggtggggcccagagcccttccccgagactgctgatgtctgtaaccactggggagcactgccaaaaatacagctttctggtttgtgagcccataaatgacttaaatcagctttacatcatttttacatatcaagtggtttcatgttaaaaaacaaactcctagtcctttagaaataacagattctctgcacaaaaccacccattcattcatttattcattcacagcactagcaagtgctgcctatgctgagaacaagtcagatctgatccctgccctcatggacctgaccactcaacaaacagtccccaccacacctatctccttaggcaagactttgcctctctcctagtcctgagtataaatcctgtgcatagattcctctagaaaggcatcaaaaggctcaacagactgaatggcctcttggtctgcgaaaattcagttgcaatgaggatgaagtcactatcctagaggctgcttggcccagaagagccaggcacagagctgcagttgggcacgccaaggattccaaaggtggaatgagagagtagggtcaaactgtcacagtatctgctccataggtttctgtttttaatttcaatgttaaatacaactacaatatgagcgagaactgcattttcttgggtgttgagaacttgtaccatggacttcagaccgccttgcagccgtatgctgcacaagcgtgtacaccccctgggcagcctcaaaaccccgcttacagcagcaacacaggagatcatctgtccattttagaaccattaatctctttatccattgctgaacgactgtgactattcagtaacgaagtaatagtaattaattagtatggtataatctttaataaatttcgtgccaaaatgcatggttttccacttagcattcaaaatgttgcatagagagtagttttcaatttcttatgtactcttcgaagtaagttgaaaatcagtttctacattttaattcgtttcctgttaaatctgttgcactctcctgggctgtctttttctccagcagacccctgcatgcagttgtgtaaggactttctctaattcttgtgaatcgtctcacccgcagtaaccactgaacgtcaatcagccctccatggggttctttcgatttttggtgaagtattttgttacctcagtcttgtatcaagttgctgtatttttcagcttgttacattgataataattatttcactaattaaatactttaatgtacaaacatctttgtttactttgaaattaaatgtgttttccaatgaaaaaa

SEQ ID NO: 2726 - DNA, 1690 bp, Homo sapiens
aacgccagcgcctgcgcactgagggcggcctggtcgtcgtctgcggcggcggcggcggctgaggagcccggctgaggcgccagtacccggcccggtccgcatttcgccttccggcttcggtttccctcggcccagcacgccccggccccgccccagccctcctgatccctcgcagcccggctccggccgcccgcctctgccgccgcaatgatgatgatggcgctgagcaagaccttcgggcagaagcccgtgaagttccagctggaggacgacggcgagttctacatgatcggctccgaggtgggaaactacctccgtatgttccgaggttctctgtacaagagatacccctcactctggaggcgactagccactgtggaagagaggaagaaaatagttgcatcgtcacatgatcacggatacacgactctagccaccagtgtgaccctgttaaaagcctcggaagtggaagagattctggatggcaacgatgagaagtacaaggctgtgtccatcagcacagagccccccacctacctcagggaacagaaggccaagaggaacagccagtgggtacccaccctgcccaacagctcccaccacttagatgccgtgccatgctccacaaccatcaacaggaaccgcatgggccgagacaagaagagaaccttccccctttgctttgatgaccatgacccagctgtgatccatgagaacgcatctcagcccgaggtgctggtccccatccggctggacatggagatcgatgggcagaagctgcgagacgccttcacctggaacatgaatgagaagttgatgacgcctgagatgttttcagaaatcctctgtgacgatctggatttgaacccgctgacgtttgtgccagccatcgcctctgccatcagacagcagatcgagtcctaccccacggacagcatcctggaggaccagtcagaccagcgcgtcatcatcaagctgaacatccatgtgggaaacatttccctggtggaccagtttgagtgggacatgtcagagaaggagaactcaccagagaagtttgccctgaagctgtgctcggagctggggttgggcggggagtttgtcaccaccatcgcatacagcatccggggacagctgagctggcatcagaagacctacgccttcagcgagaaccctctgcccacagtggagattgccatccggaacacgggcgatgcggaccagtggtgcccactgctggagactctgacagacgctgagatggagaagaagatccgcgaccaggacaggaacacgaggcggatgaggcgtcttgccaacacggccccggcctggtaaccagcccatcagcacacggctcccacggagcatctcagaagattgggccgcctctcctccatcttctggcaaggacagaggcgaggggacagcccagcgccatcctgaggatcgggtgggggtggagtgggggcttccaggtggcccttcccggcacacattccatttgttgagccccagtcctgccccccaccccaccctccctacccctccccagtctctggggtcaggaagaaaccttattttaggttgtgttttgtttttgtataggagccccaggcagggctagtaacagtttttaaataaaaggcaacaggtcatgttcaatttcttcaacaaaaaaaaaaaaaaa

SEQ ID NO: 2727 - DNA, 380 bp, Homo sapiens
agtttttttaaaaaattgttacaaataaaaagtttttaatacattcatcctttgcacacaaaatacattctttttcttttactctcagtatgaattatttcttaataatagaaaacataggctacaatgaatggacagtcatatggtttggtgatttgacaaacttttttcaagaagcaaagtccaattttaaaagacagacaatatataaaataacttacatatttaaaatgctacttcattgaatcctaaaagattgaatgagtactcttatccagcatgatttgtagttgtcctttaaacaatgcagaggacaagaaatcctctatgtgatggcaactcaatttctacaagactgaaacagtcttcatgaaattgat

SEQ ID NO: 2728 - DNA, 2020 bp, Homo sapiens
aagggcccagagctctggccggcggaccttttccttctggagtttccccggcgggttcacagtccagccactgaccgcagcagcgcccttgcgtagcagccgcttgcagcgagaacactgaattgccaacgagcaggagagtctcaaggcgcaagaggaggccagggctcgacccacagagcaccctcagccatcgcgagtttccgggcgccaaagccaggagaagccgcccatcccgcagggccggtctgccagcgagacgagagttggcgagggcggaggagtgccgggaatcccgccacaccggctatagccaggcccccagcgcgggccttggagagcgcgtgaaggcgggcatccccttgacccggccgaccatccccgtgcccctgcgtccctgcgctccaacgtccgcgcggccaccatgatgcaaatctgcgacacctacaaccagaagcactcgctctttaacgccatgaatcgcttcattggcgccgtgaacaacatggaccagacggtgatggtgcccagcttgctgcgcgacgtgcccctggctgaccccgggttagacaacgatgttggcgtggaggtaggcggcagtggcggctgcctggaggagcgcacgcccccagtccccgactcgggaagcgccaatggcagctttttcgcgccctctcgggacatgtacagccactacgtgcttctcaagtccatccgcaacgacatcgagtggggggtcctgcaccagccgcctccaccggctgggagcgaggagggcagtgcctggaagtccaaggacatcctggtggacctgggccacttggagggtgcggacgccggcgaagaagacctggaacagcagttccactaccacctgcgcgggctgcacactgtgctctcgaaactcacgcgcaaagccaacatcctcactaacagatacaagcaggagatcggcttcggcaattggggccactgaggcgtggcgcccgtggctgcccagcaccttcttcgacccatctcaccctctctcattcctcaaagctttttttttttttcctggctggggggcgggaagggcagactgcaaactggggggctgcgtacgtgcaggaggcgcggtggggctgcgtggaggagggggccacgtgtgagagagaagaaaatggtggccggagatgggagggcccaaggaacctcctgggagggggcctgcattctatgttggtgggaatgggactgggctgacgccctgcattcagcctgtgcctttcctggggtttcttttctgttcttttcggaggagagggcccgagaaggggccataccagggcgcggcgctgggttgccacacttgggaaagcagcccggagctgggtgctggggaaggcggggcgcgtagcctcccgccgccctgcggttgggccggtggaggcccaggcgttgctaggattgcatcagttttcctgtttgcactatttctttttgtaacattggccctgtgtgaagtatttcgaatctcctccttgctctgaaacttcagcgattccattgtgataagcgcacaaacagcactgtctgtcggtaatcggtactactttattaatgattttctgttacactgtatagtagtcctatggcacccccaccccatccctttcgtgccactcccgtccccacccccaccccagtgtgtataagctggcatttcgccagcttgtacgtagcttgccactcagtgaaaataataacattattatgagaaagtggacttaaccgaaatggaaccaactgacattctatcgtgttgtacatagaatgatgaagggttccactgttgttgtatgtcttaaatttatttaaaactttttttaatccagatgtagactatattctaaaaaataaaaaagcaaatgtgtcaactaaattggacaagcgtctggtcctcattaatctgccaatgaatggtttcgtcattaaataaaaatcaatttaattgatttactagcaaaaaaaaaaaaaa

SEQ ID NO: 2729 - DNA, 2949 bp, Homo sapiens
cctctaggagtgaaggaaaggcggggacccggatgtgtgtggtggcggcggccgaagagcttgtgtgcggagctgagaggcctatggatgaggaggacgcggcggccccggtttgttctcatgaacaagatggatgacctcaacctgcactaccggtttctgaattggcgccggcggatccgggagattcgagaggtccgagctttccgatatcaggagaggttcaaacatatccttgtagatggagatactttaagttatcatggaaactctggtgaagttggctgctacgtggcttctcgacccctgaccaaggacagcaattattttgaggtgtctattgtggacagtggagtccggggcaccattgctgtggggctggtccctcagtactacagcttggatcaccagcctggctggttgcctgactctgtagcctaccatgctgatgatggcaagctgtacaatggccgagccaagggccgccagtttgggtcaaagtgcaactccggggaccggattggctgtggcattgagcctgtgtcctttgatgtgcagaccgcccagatcttcttcaccaaaaatgggaagcgggtgggctctaccatcatgcccatgtccccagatggactgttcccagcagtgggcatgcactccctgggtgaggaggtgcggctgcacctcaacgctgagctgggccgtgaggacgacagcgtcatgatggtggacagttacgaggatgaatggggccggctacatgatgtcagagtctgtgggactctgctggagtacttagggaagggcaaaagcatcgtggatgtggggctggcccaggcccggcacccactcagcacccgcagccactacttcgaggtggagatcgtggaccctggagagaaatgctacatcgccctggggctggcacggaaggactatcccaagaacaggcaccctggctggagcagagggtctgtggcttatcatgcagacgatgggaagatcttccatggcagtggtgtgggggacccctttgggccacgctgttacaaaggggacatcatgggctgtggaatcatgttcccccgggactacattttggacagtgagggggacagtgatgacagttgtgacacagtgatcctgtctccgactgcccgggccgtccggaacgtgcggaatgtcatgtacctgcaccaggaaggggaagaggaagaggaggaagaggaagaggaagaggatggggaagagatagagccggagcatgagggcaggaaggtggtggttttcttcactcggaatggcaagatcattgggaagaaggatgctgttgttccttctggaggcttcttccccaccattggaatgctgagctgcggggagaaagtcaaagtagatctgcaccccttgagtggctagggcctcccctccagacctgctccttctccctgctcaccctctgctgggccaggcacccagttcctgacttcccagaggcttcgtttacccagcaggcccctggaggtgtgtagtcactctgcccccactggctcaggcccctgtcacgcttctctgtgcccacgtttctgacctggtgctgccactgttgtcagtccctgggcctgagtccctggttggacaggaatggacccaaagaatggtgttggtatgtgggtggtcccactcgctttggtcagtgggcttctgggtccccctttccctcaccggccctgtgtgggtggagaggcgtgagcaccctatctcagctgctattcgggcatgatgctttgtagagggtagagtagacagccccctcccctactcaccatggtatttctccttgaattcctctttcttgttttctttcctggttgtgtgaaccagttgctgctgtcatacccctggcagggccaggggacctctctttggtcatctctgtcctttcactggctgctgccccaggaagactcctctaggctctccatctttcccttgagagctggctccccaccccaacctgctcaggcaccacagaggatctaggtctctggctccccatacctggacccacatgggtgggtgcctgttgcatgtttaagagagaggggctgtgaggtgacagggcactagggccttcactcctttctccccttccatcctttctttaccagtgccacccatgtccctagctcccgggtattggggctgaggctctggggcctgtctccctgccagcgtgagggcaagaccccagagccttagctgagcaagcccagaggggcagcgtggcccctccctccccttttcctgccccgtcccatgcctcagcttgctgcttgtgccagttgcctgtttcgcttcagtgtttgattctagcacttacatgtgtcctccccaccaagccctctatctccttctaatccttcaacccctggccccctccccgtaacagtgacttttccagggaggaagaggcagcaggagctgttggccttggtttgcacagagcgggtagggctgtagggaaagcgggtgagctgttgtgctgctgggcctccctttggccctcgcttcccaccctacgatgtatgaaatgtatgtacagaccagagatgtttatacagccgataaagatggagtttccgtatttatcagtatggccggaaccaggagcctttctagtccactgggctaggaacaggactgctggatgggggcagccgaaggcagcttgctcatggggagatgtggaccaatgttgggccagggatgggaatcatatgttccatgggcctggctacaggcctgagcacagatacgtcccctgggagatgaggctttgaccttcctgtgaataagtgttgactccaatttcggctaaagtttatagaaattctttattattagacaaaaatagactctcttttttcccctaaaaaaaaaaaaaaaaaa

SEQ ID NO: 2730 - DNA, 466 bp, Homo sapiens
cttgccgcgctgcactccaccacgcctcctccaagtcccagcgaacccgcgtgcaacctgtcccgactctagccgcctcttcagctcgccatggatcccaactgctcctgcgccgccggtgactcctgcacctgcgccggctcctgcaaatgcaaagagtgcaaatgcacctcctgcaagaaaagctgctgctcctgctgccctgtgggctgtgccaagtgtgcccagggctgcatctgcaaaggggcgtcggacaagtgcagctgctgcgcctgatgctgggacagccccgctcccagatgtaaagaacgcgacttccacaaacctggattttttatgtacaaccctgaccgtgaccgtttgctatattcctttttctatgaaataatgtgaatgataataaaacagctttgacttgaaaaaaaaaaaaaaaaaaaaaaaaaaaaaaaaaaaaaaaaaaaaaaaa

SEQ ID NO: 2731 - DNA, 4635 bp, Homo sapiens; identical to SEQ ID NO: 2192

SEQ ID NO: 2732 - DNA, 173 bp, Homo sapiens; identical to SEQ ID NO: 2349

SEQ ID NO: 2733 - DNA, 3258 bp, Homo sapiens
aaggctgtggaccccagagaaggtggcaggtggcccccctaggagagctctgggcacattcgaatcttcccaaactccaataataaaaattcgaagactttggcagagagtgtgtgtgtgtgtgtatggttgttgggcgtaggacaggtttcggggatgcgcggtacgcggtaccacccctcggaggcccccacccccagacgcccaggccgcctccccactccccctcaagcagccccagccggggactttccgtcgcggggaaggggcggggaccctgagcgaaaggtgcggaggcggcctgccggggtggttcggcttcccgttgccgcctcgggcgctgtacccagagctcgaagaggagcagcgcggccgcgcggacccggcaaggctgggccggactcggggctcccgagggacgccatgcggggaggcaggggcgcccctttctggctgtggccgctgcccaagctggcgctgctgcctctgttgtgggtgcttttccagcggacgcgtccccagggcagcgccgggccactgcagtgctacggagttggacccttgggcgacttgaactgctcgtgggagcctcttggggacctgggagccccctccgagttacacctccagagccaaaagtaccgttccaacaaaacccagactgtggcagtggcagccggacggagctgggtggccattcctcgggaacagctcaccatgtctgacaaactccttgtctggggcactaaggcaggccagcctctctggccccccgtcttcgtgaacctagaaacccaaatgaagccaaacgccccccggctgggccctgacgtggacttttccgaggatgaccccctggaggccactgtccattgggccccacctacatggccatctcataaagttctgatctgccagttccactaccgaagatgtcaggaggcggcctggaccctgctggaaccggagctgaagaccatacccctgacccctgttgagatccaagatttggagctagccactggctacaaagtgtatggccgctgccggatggagaaagaagaggatttgtggggcgagtggagccccattttgtccttccagacaccgccttctgctccaaaagatgtgtgggtatcagggaacctctgtgggacgcctggaggagaggaacctttgcttctatggaaggccccagggccctgtgtgcaggtgagctacaaagtctggttctgggttggaggtcgtgagctgagtccagaaggaattacctgctgctgctccctaattcccagtggggcggagtgggccagggtgtccgctgtcaacgccacaagctgggagcctctcaccaacctctctttggtctgcttggattcagcctctgccccccgtagcgtggcagtcagcagcatcgctgggagcacggagctactggtgacctggcaaccggggcctggggaaccactggagcatgtagtggactgggctcgagatggggaccccctggagaaactcaactgggtccggcttccccctgggaacctcagtgctctgttaccagggaatttcactgtcggggtcccctatcgaatcactgtgaccgcagtctctgcttcaggcttggcctctgcatcctccgtctgggggttcagggaggaattagcacccctagtggggccaacgctttggcgactccaagatgcccctccagggacccccgccatagcgtggggagaggtcccaaggcaccagcttcgaggccacctcacccactacaccttgtgtgcacagagtggaaccagcccctccgtctgcatgaatgtgagtggcaacacacagagtgtcaccctgcctgaccttccttggggtccctgtgagctgtgggtgacagcatctaccatcgctggacagggccctcctggtcccatcctccggcttcatctaccagataacaccctgaggtggaaagttctgccgggcatcctattcttgtggggcttgttcctgttggggtgtggcctgagcctggccacctctggaaggtgctaccacctaaggcacaaagtgctgccccgctgggtctgggagaaagttcctgatcctgccaacagcagttcaggccagccccacatggagcaagtacctgaggcccagccccttggggacttgcccatcctggaagtggaggagatggagcccccgccggttatggagtcctcccagcccgcccaggccaccgccccgcttgactctgggtatgagaagcacttcctgcccacacctgaggagctgggccttctggggccccccaggccacaggttctggcctgaaccacacgtctggctgggggctgccagccaggctagagggatgctcatgcaggttgcaccccagtcctggattagccctcttgatggatgaagacactgaggactcagagaggctgagtcacttacctgaggacacccagccaggcagagctgggattgaaggacccctatagagaagggcttggcccccatggggaagacacggatggaaggtggagcaaaggaaaatacatgaaattgagagtggcagctgcctgccaaaatctgttccgctgtaacagaactgaatttggaccccagcacagtggctcacgcctgtaatcccagcactttggcaggccaaggtggaaggatcacttagagctaggagtttgagaccagcctgggcaatatagcaagacccctcactacaaaaataaaacatcaaaaacaaaaacaattagctgggcatgatggcacacacctgtagtccgagccacttgggaggctgaggtgggaggatcggttgagcccaggagttcgaagctgcagggacctctgattgcaccactgcactccaggctgggtaacagaatgagaccttatctcaaaaataaacaaactaataaaaagcaaaaaaaaaaaaaaaagaaaagaaaaaacactgcatttgggcaccatctcagctcccttgcatccaggtgcagcatggactgagttcttgacaacagaatgtggtcagaagtgacatatgccaacacggggtctgggtgggggctcccccacatcctttccttgcctatgagctggaacataacacatgcctatgatccagctttggtcatacccaaggggaaggtggagcaagaaatgaaaaggaacctgaatccctgaatgactgcatggatagaaccactaagaaaaataaacttttatatttttata

SEQ ID NO: 2734 - DNA, 494 bp, Homo sapiens
ttttcatattgaacttttatttctgtgcggtagtcagttaaattcttcatggcatatagtaattatcaggccatttgagaatattttacaagcaggttggaacagagaacaggtagtaggaaaccagatcttatctctttgagactcattttgaattaactacccctcacctctcattcgaaggcactatattttgcagagaaaaactcacacaacccaaatgtttaatcagaagccatgtaataactgaaacacatgttcagtttctcaataatgcttatttctaaagagaacattaaaaacttggtggcgccggggtggggcttaaaaccattgaatcactggtccccaacttttttggcaccaaggaccagtttcctggaagacaatttttccagactcgggggtggggatggtttcaggatgaaactgttgccagcgcgatcaggtattagattccataaggagtggcacacctagatcccttgcatgca

SEQ ID NO: 2735 - DNA, 2286 bp, Homo sapiens
aagagaggaaggcttaaagagccagactgcgcagccaggactggggtgatgggcgctgtcctgccaggccaaagaatgaagatgtagccccgcccccaacctagggaggaggaccagcccggttcctgtcctgcccccgcaacctcgccccgattccactccgggaacctcggcgatgctgagccaagaccacttctgaatcagggatgacttgtctagtgaacctagggtcagagccatcagttggaaaggctgggaggagcctggagaaagagggcgaccttccttgggatctgtgcgctccctccttgcctccccctccagcctcccacttggtagcaccttcctgatccccttatctctaaggcgctcagggaaatgccccgctgcgggagccttctgggaaatgctgccctggccacccaggaaccatgagccctgcagccccggtcccgcctgactccgctctggaaagtccttttgaagaaatggccctggtgaggggcggctggctgtggagacagagctccatcctccgccgctggaagcggaactggtttgccctgtggctggacgggaccctgggatactaccacgatgagacagcgcaggacgaggaggaccgtgtgctcatccacttcaatgtccgtgacataaagatcggcccagagtgccatgatgtgcagcccccagagggccggagccgagatggcctgctgactgtgaacctacgggaaggcggccgcctgcacctctgtgcggagaccaaggatgatgccctagcatggaagacagcactgctggaggcaaactccaccccggtgcgcgtctacagcccgtaccaagactactacgaggtggtgccccccaatgcacacgaggccacgtatgtccgcagctactacggaccgccctacgcaggccctggcgtgacgcacgtgatagtgcgggaggatccctgctacagcgccggcgcccctctggccatgggcatgcttgcgggagccgccactggggcggcgctgggctcgctcatgtggtcgccctgctggttctgagccctgggactcggagcactgacccctgcgcttggattgctagactcctcttcctcctggaccccatcctctaccatccaagccctgtcccactttggccctatcctctccattagctccttccgggtttggaccattccccccactccctacccttaatccccacatgggaagaagctatcatcacaggtacaaacatcgcttgaagtcttcacatctaccactagacacccccaaaatctgttatagacatttatggatacatttcctctaaacacaacagggcacagcaaatacgacttcatttggcttcgagttccccaggcgctgtagacacaacatgaatcgggctctctgctctctccttagggagctcgagtcctggtggggagaacaggagtaaacaaggacttgacaaagctgaagagttatcagtcctttgacaaggacaggtggggcagggagcaagacaggtaggctggaagaacagttattggcaagtatgcagagccgtgaacgtcatggcatgtccaaggaattaaatgggagttcatttgggctggggtggaggctgggatcagaccgtggtgggccttcaagctaaggagcttcctaggtgaaaggggagatgtgagccttctctggagggaagtttcatgattgcatctataatgaatatattgcctgttttgtgaatactgacacatgtccatacctaaaacactcctgagttaagtcccatccttcccacaaacagcttcctggctggtacccatgataacaattgagctgaacctggggacccctggttggggaacaggtgagttctatttgagacttccagccctagaaagctgcctccgtccagaaatgcctctcacaccaggagctcggccctctctttgtagctgtgactgtcaccctctcaggctttgtctcatccttcattctgaataagatggcagtgttctcctctggggcctgatccacctctacaccagcccaggaagccccatctgtgcctgccctcaggtggtccaccagtctccccctttggttcccttccagtctcttccccctttctatcccaatcaccaatagaaatgctaacatccctgcctggtagccagactagcccactaaagctcccctgtaaatgggggctccattagttctgctgccgagactaataaagatttggttggctctagcagtaaaaaaaaaaaaa

SEQ ID NO: 2736 - DNA, 938 bp, Homo sapiens
ggacacagcatggacatgagggtccccgctcagctcctggggctcctgctgctctggctcccaggtgccagatgtgtcatctggatgacccagtctccatccttactctctgcatctacgggagacagagtcacaatcagttgtcggatgagtcagggcattagcaattatttagcctggtatcagcaaaaaccagggaaagcccctgacctcctgatctatgctgcatccactttgcaaagtggggtcccatcaaggttcagtggcagtggatctgggacagatttcattctcaccatcagccgcctgcagtctgaagattttgcaatttattactgtcaacagtattatagtttcccattcactttcggccctgggaccaaagtggatatcaaacgaactgtggctgcaccatctgtcttcatcttcccgccatctgatgagcagttgaaatctggaactgcctctgttgtgtgcctgctgaataacttctatcccagagaggccaaagtacagtggaaggtggataacgccctccaatcgggtaactcccaggagagtgtcacagagcaggacagcaaggacagcacctacagcctcagcagcaccctgacgctgagcaaagcagactacgagaaacacaaagtctacgcctgcgaagtcacccatcagggcctgagctcgcccgtcacaaagagcttcaacaggggagagtgttagagggagaagtgcccccacctgctcctcagttccagcctgaccccctcccatcctttggcctctgaccctttttccacaggggacctacccctattgcggtcctccagctcatctttcacctcacccccctcctcctccttggctttaattatgctaatgttggaggagaatgaataaataaagtgaatctttgcaaaaaaaaaaaaaaaaaaaaaaaa

SEQ ID NO: 2737 - DNA, 4868 bp, Homo sapiens; identical to SEQ ID NO: 783

SEQ ID NO: 2738 - DNA, 3134 bp, Homo sapiens
gtttggggccggcccaggcctagggtgtggaggagccttgccatcgggcttcctgtctctcttcatttaagcacgactctgcagaaggaacaaagcaccctccccactgggctcctggttgcagagctccaagtcctcacacagatacgcctgtttgagaagcagcgggcaagaaagacgcaagcccagaggccctgccatttctgtgggctcaggtccctactggctcaggcccctgcctccctcggcaaggccacaatgaaccggggagtcccttttaggcacttgcttctggtgctgcaactggcgctcctcccagcagccactcagggaaagaaagtggtgctgggcaaaaaaggggatacagtggaactgacctgtacagcttcccagaagaagagcatacaattccactggaaaaactccaaccagataaagattctgggaaatcagggctccttcttaactaaaggtccatccaagctgaatgatcgcgctgactcaagaagaagcctttgggaccaaggaaactttcccctgatcatcaagaatcttaagatagaagactcagatacttacatctgtgaagtggaggaccagaaggaggaggtgcaattgctagtgttcggattgactgccaactctgacacccacctgcttcaggggcagagcctgaccctgaccttggagagcccccctggtagtagcccctcagtgcaatgtaggagtccaaggggtaaaaacatacagggggggaagaccctctccgtgtctcagctggagctccaggatagtggcacctggacatgcactgtcttgcagaaccagaagaaggtggagttcaaaatagacatcgtggtgctagctttccagaaggcctccagcatagtctataagaaagagggggaacaggtggagttctccttcccactcgcctttacagttgaaaagctgacgggcagtggcgagctgtggtggcaggcggagagggcttcctcctccaagtcttggatcacctttgacctgaagaacaaggaagtgtctgtaaaacgggttacccaggaccctaagctccagatgggcaagaagctcccgctccacctcaccctgccccaggccttgcctcagtatgctggctctggaaacctcaccctggcccttgaagcgaaaacaggaaagttgcatcaggaagtgaacctggtggtgatgagagccactcagctccagaaaaatttgacctgtgaggtgtggggacccacctcccctaagctgatgctgagtttgaaactggagaacaaggaggcaaaggtctcgaagcgggagaaggcggtgtgggtgctgaaccctgaggcggggatgtggcagtgtctgctgagtgactcgggacaggtcctgctggaatccaacatcaaggttctgcccacatggtccaccccggtgcagccaatggccctgattgtgctggggggcgtcgccggcctcctgcttttcattgggctaggcatcttcttctgtgtcaggtgccggcaccgaaggcgccaagcagagcggatgtctcagatcaagagactcctcagtgagaagaagacctgccagtgtcctcaccggtttcagaagacatgtagccccatttgaggcacgaggccaggcagatcccacttgcagcctccccaggtgtctgccccgcgtttcctgcctgcggaccagatgaatgtagcagatcccaggcctctggcctcctgttcgcctcctctacaatttgccattgtttctcctgggttaggccccggcttcactggttgagtgttgctctctagtttccagaggcttaatcacaccgtcctccacgccatttccttttccttcaagcctagcccttctctcattatttctctctgaccctctccccactgctcatttggatcccaggggagtgttcagggccagccctggctggcatggagggtgaggctgggtgtctggaagcatggagcatgggactgttcttttacaagacaggaccctgggaccacagagggcaggaacttgcacaaaatcacacagccaagccagtcaaggatggatgcagatccagaggtttctggcagccagtacctcctgccccatgctgcccgcttctcaccctatgtgggtgggaccacagactcacatcctgaccttgcacaaacagcccctctggacacagccccatgtacacggcctcaagggatgtctcacatcctctgtctatttgagacttagaaaaatcctacaaggctggcagtgacagaactaagatgatcatctccagtttatagaccagaaccagagctcagagaggctagatgattgattaccaagtgccggactagcaagtgctggagtcgggactaacccaggtcccttgtcccaagttccactgctgcctcttgaatgcagggacaaatgccacacggctctcaccagtggctagtggtgggtactcaatgtgtacttttgggttcacagaagcacagcacccatgggaagggtccatctcagagaatttacgagcagggatgaaggcctccctgtctaaaatccctccttcatcccccgctggtggcagaatctgttaccagaggacaaagcctttggctcttctaatcagagcgcaagctgggagcacaggcactgcaggagagaatgcccagtgaccagtcactgaccctgtgcagaacctcctggaagcgagctttgctgggagagggggtagctagcctgagagggaaccctctaagggacctcaaaggtgattgtgccaggctctgcgcctgccccacaccctcccttaccctcctccagaccattcaggacacagggaaatcagggttacaaatcttcttgatccacttctctcaggatcccctctcttcctacccttcctcaccacttccctcagtcccaactccttttccctatttccttctcctcctgtctttaaagcctgcctcttccaggaagacccccctattgctgctggggctccccatttgcttactttgcatttgtgcccactctccacccctgctcccctgagctgaaataaaaatacaataaacttactataaagatgcaaaaaaaaaaaaaaaaaa

SEQ ID NO: 2739 - DNA, 942 bp, Homo sapiens
atgagcatcggcctcctgtgctgtgcagccttgtctctcctgtgggcaggtccagtgaatgctggtgtcactcagaccccaaaattccaggtcctgaagacaggacagagcatgacactgcagtgtgcccaggatatgaaccatgaatacatgtcctggtatcgacaagacccaggcatggggctgaggctgattcattactcagttggtgctggtatcactgaccaaggagaagtccccaatggctacaatgtctccagatcaaccacagaggatttcccgctcaggctgctgtcggctgctccctcccagacatctgtgtacttctgtgccagcagtttcccccggcagccgtcctacaatgagcagttcttcgggccagggacacggctcaccgtgctagaggacctgaaaaacgtgttcccacccgaggtcgctgtgtttgagccatcagaagcagagatctcccacacccaaaaggccacactggtgtgcctggccacaggtttctaccccgaccacgtggagctgagctggtgggtgaatgggaaggaggtgcacagtggggtcagcacagacccgcagcccctcaaggagcagcccgccctcaatgactccagatactgcctgagcagccgcctgagggtctcggccaccttctggcagaacccccgcaaccacttccgctgtcaagtccagttctacgggctctcggagaatgacgagtggacccaggatagggccaaacctgtcacccagatcgtcagcgccgaggcctggggtagagcagactgtggcttcacctccgagtcttaccagcaaggggtcctgtctgccaccatcctctatgagatcttgctagggaaggccaccttgtatgctgtgctggtcagtgccctcgtgctgatggccatggtcaagagaaaggattccagaggctga

SEQ ID NO: 2740 - DNA, 358 bp, Homo sapiens
ccaaacttcagcattctaggcagaaagtcacaaaacaggaggaagcgagtctgattcccagcatcagataaactgctaaactctactgtgggtaagaacaaaactgtgcttaccagaaaacttaatttttatttcgatgaatttctaatagtgaaataaattactttaaagcacaacaaagaagaaagtcaacacccaaacgttcttgggctcaggaagtatggtgcttgacgggagggttaaaagctgtcagccctgaagacaggcaggaaagtctctctttatgaccccctcccagcaaggctgtgttttttcaacacttctaacccttctgcatgggaatcttggaatgtttttt

SEQ ID NO: 2741 - DNA, 7620 bp, Homo sapiens; identical to SEQ ID NO: 2365

SEQ ID NO: 2742 - DNA, 5426 bp, Homo sapiens; identical to SEQ ID NO: 2474

SEQ ID NO: 2743 - DNA, 4941 bp, Homo sapiens; identical to SEQ ID NO: 2111

SEQ ID NO: 2744 - DNA, 5576 bp, Homo sapiens
gcggccgccgcctgccgggcctcccctcgccgcggccggccgccgcgctcccgcccgggcgcccagctatgtactccccgtactgcctcacccaggatgagttccacccgttcatcgaggcactgctgcctcacgtccgcgctttctcctacacctggttcaacctgcaggcgcggaagcgcaagtacttcaagaagcatgaaaagcggatgtcgaaggacgaggagcgggcggtgaaggacgagctgctgggcgagaagcccgagatcaagcagaagtgggcatcccggctgctggccaagctgcgcaaggacatccggcccgagttccgcgaggacttcgtgctgaccatcacgggcaagaagcccccctgctgcgtgctctccaaccccgaccagaagggcaagatccggcggattgactgcctgcgccaggctgacaaggtgtggcggctggacctggtcatggtgattttgtttaaggggatccccctggaaagtactgatggggagcggctctacaagtcgcctcagtgctcgaaccccggcctgtgcgtccagccacatcacattggagtcacaatcaaagaactggatctttatctggcttactttgtccacactccggaatccggacaatcagatagttcaaaccagcaaggagatgcggacatcaaaccactgcccaacgggcacttaagtttccaggactgttttgtgacttccggggtctggaatgtgacggagctggtgagagtatcacagactcctgttgcaacagcatcagggcccaacttctccctggcggacctggagagtcccagctactacaacatcaaccaggtgaccctggggcggcggtccatcacctcccctccttccaccagcaccaccaagcgccccaagtccatcgatgacagtgagatggagagccctgttgatgacgtgttctatcccgggacaggccgttccccagcagctggcagcagccagtccagcgggtggcccaacgatgtggatgcaggcccggcttctctaaagaagtcaggaaagctggacttctgcagtgccctctcctctcagggcagctccccgcgcatggctttcacccaccacccgctgcctgtgcttgctggagtcagaccagggagcccccgggccacagcatcagccctgcacttcccctccacgtccatcatccagcagtcgagcccgtatttcacgcacccgaccatccgctaccaccaccaccacgggcaggactcactgaaggagtttgtgcagtttgtgtgctcggatggctcgggccaggccaccggacagcattcgcaacgacaggcgcctcctctgccaaccggtttgtcagcatcggaccccgggacggcaactttctgaacatcccacagcagtctcagtcctggttcctctgataagatcgacaaaagaaacaacaaaatgagaagaagaggttcctcgaaaggggggagaagaaattttgagaatggaaaaatcccccagcccagcccagccccaccgaaaagcaaaaattacacgtcgtcagccactcagcccttctctcctccagcccggggacccccgcgggccccagaagcagcccagttctcagagagcccttggaaggggtctcggtggagctgtgcaccagcagccaagcagaaagaaacacgcgacatggactctgtcaagtagaggacagaaagcaagaaaggatgcagaactgccttcctccccctgaccccgccccggccttctggggaaggaacaaagtccccaaacaaagcaaccagcacaattctgaaggggcctggcctccaccctcaccccttcctaggggaaccccaccctccacacagccggagctgccctagggagcctggagggccagcttgtaaagatgatggggtttagatccctcaggctctcccctccagactccgcccttccctccctccctccctccctccctctctgccaaggctccagcttcttcccccagctgctcccgaccaggagggggagagcagcctccacttaccccaccccacccttgggctaaaagcccccaggcgggcagggggtgacccctggagctagttgcgtgtcccagaatggagggtgttctgacaccccaccctgagccgcaagagcagtcctggggccctggacccctctgtacagtccgtaggaaaaagtcggaatgctctcgacggcctcgtcccagcctgggacaggccccctttcccctctctctgcaggccaggagggcctccttcctgccacgagggaggggagtcgggccccaggtcgcccccgcccccagccctgcatgcaggtgccctcgctccgccccatcagttcctgcccctgcccctcatgcagactgccctgctggggccgggccggagggtggagcagaaaggggaccccggagccgagcgaggaggaccaggcagccgccgctgccgcgctaagccaccacctgcgcttaggtaggcgtcctgctcgccgactttcagttccttgggagggtgttgggtgtcgtccttttcaaaagtgttttggagctttctgtgccccccgactttcccccgcctccccgccccccacgtggccacttttctctggattttagctgtaatgtctttactctttatttaggggtggggcattcattgtttgggtcttttgctgttggaatgggaactcctcctccatttgagcaacttgggaacaatttggtaacacaccacaggaagtagctctcccccccagccccctcctccctcaagggagggttggggggcctgtccagagggtcttcagaagcccccctgggagggaggggaggatgagcacgcccagctcccctccagggtgtgacttggcccctctggcttgtctttctgtgccttactcctcctcctgcgtctcccgttcctggccccttcttgagtccttgtgcctctctctttctctctctttcttaattgtatgaaaacacaaagcacaggtcaggatcctctgagagaaaatcaacattgcaccacgtaggggtgggctatgggctgtatttattgtgaatctagtttgtgaggctgtggccccgagctggcggagggagggaagaggagggagtgacgggaggggaggaggtcagcgacctggggccgtagcggcaggcgaacggtgcctgctacccagctggaagccacaaggtggctggctccaggggcggcttttgttggaagttgagtgaagccctccccctgtcctcagcgtgcagccctagaggaccccagggctgaggggcagtggatcctgcgggagtctcccggggcgtggggagtaaggccccgggggtggggggccgggtgggccgggcgtgacgcgcggtcaaagtgcaatgatttttcagttcggttggctaaacagggtcagagctgagagcgaagcagaaggggctccctgtccggcccacgtgccctttccctcgacgacagtcgagggctcgggctctgtgggactgtgggagctagggtctgcggggcgcctgcccgggcgaggtcggaagctgcaggccagctgggcccgggccggagcgtgcccggcggggctgcccgggcgggcagggggtgggggctgctcctttcccaagtggtgttgtgaggggcaatgagggcaacaggagatgtggggacgtgttaggagagaaaaaaaaaaaaacaaaaatatatatgggggaaattaacttttttttttcattgaaccaagtgcaatgcatcagagagttttcctatctttgtatgttaagagattaagaaaaaaaaattctatttttgttgtaatgtcctcgcggctctggggacgctaaaagaaccgggcctgccccgccctgcgcggggataacgaaagctgagtgtttttcccttttttttgttcgtttttagtttttttttttttaagtcgttttcctgcgttgacgaggatgatctggggtttttatttgtttcgtcgttcgttctgtttcggtgggagggctgaaggaaacgttcacattttagagtttaaaaaaaacacctcgacatttaaaaaatcaaccaacacaagatcaaaaaggaaaaggacgagagaaaaattatttttaagataattaaacataaaaccctggtgcttcttacattataaagtacgttttaaagaacccacaaactattatacataagtttatgaatcaattaaatatcctgcacttgttaggaatacgcatatcccttctttgttgagtttaacggaacgggacagcggcgtgcccccggcggctggactgctccggccgcgggtctccccgggcgcccctccctggggcccagcacccctcctcgccccatccccgtccgggtacgggggcgcggcaggggtccccggcccctcccccgcagaggtcaatgccaacgaacaaacgtcccctccctccctccctctccgccccgagcgcccttctttgagccagacgccaacttgaccctcaccagcattatcaggagcgcgctcagcaagttggtagtttcctcccccctttcccggcgcccctcccgcccccattcaacatctctcatcctatccccgaccccctccggggaacaccgggaaggctcgacgctccaggacaggaccagccacgcagacaggtcgatttgcccaggcccgcgcccgcacgcacgcacgcacacggccccgcacacagccccgccccaccccgcaaccagccctgtcgactgccttatacacccgcccccgcgctggccggccgacctagtgccttgttctcacccccgtgctggcggagcggacgccgcgctctgggtcccagaggggccgggtggctcagacgacccaccactcccccaccctgaccgtgctgaacagacccccccacacgagagaaaataaaggagcaataaagtcacgagaactttcgtcccccaatcgagagcccgaggggcaccccagccccgcctctgctcccccccaccccacccaccctcggggcgcccccctccccccgcaagccagcctgggccagccccgcttcggcccctcccgggagatccgtgcgcccgaccagcaccagcatcgcggaccgcaaaggccgcccgtcccgtcaaacaagtttcttcttaggctaagaaacgcagtatatacgagtatctctatatatagtactaatggatttggtgtgcttcccccttagcgtccccctccctctgctcctcctccttcagcctggtctccccctcttctctgccctccacccccgtctctgcactgagatacataagaaacaagggtagtttactgtctgttttgttttctgggttttcagtgtcctagcggaatgcaagtaggcagccagcccgtctgttccctctccgccccgccccgccccgcccccgtcactgcgcttctgttataccatctttgcctgactctctccggcttctccattgaatggctaatgtgtatgtgaaataaagaaataaagaaaaacaaacgcga

SEQ ID NO: 2745 - DNA, 6511 bp, Homo sapiens
attttccccccttcggccgcggcgaggaggagccggagcgggagtgacaccgagccggacccagcgcgacctgcggcggctccgggtgactcgggccagtgtagaggtcctcaggccgccggcaggagcagctgggccaattccctggccgggagcggaaggggatggcgtcgggcctgggctccccgtccccctgctcggcgggcagtgaggaggaggatatggatgcacttttgaacaacagcctgcccccaccccacccagaaaatgaagaggacccagaagaggatttgtcagaaacagagactccaaagctcaagaagaagaaaaagcctaagaaacctcgggaccctaaaatccctaagagcaagcgccaaaaaaaggagcgtatgctcttatgccggcagctgggggacagctctggggaggggccagagtttgtggaggaggaggaagaggtggctctgcgctcagacagtgagggcagcgactatactcctggcaagaagaagaagaagaagcttggacctaagaaagagaagaagagcaaatccaagcggaaggaggaggaggaggaggaggatgatgatgatgattcaaaggagcctaaatcatctgctcagctcctggaagactggggcatggaagacattgaccacgtgttctcagaggaggattatcgaaccctcaccaactacaaggccttcagccagtttgtcagacccctcattgctgccaaaaatcccaagattgctgtctccaagatgatgatggttttgggtgcaaaatggcgggagttcagtaccaataaccccttcaaaggcagttctggggcatcagtggcagctgcggcagcagcagcggtagctgtggtggagagcatggtgacagccactgaggttgcaccaccacctccccctgtggaggtgcctatccgcaaggccaagaccaaggagggcaaaggtcccaatgctcggaggaagcccaagggcagccctcgtgtacctgatgccaagaagcctaaacccaagaaagtagctcccctgaaaatcaagctgggaggttttggttccaagcgtaagagatcctcgagtgaggatgatgacttagatgtggaatctgacttcgatgatgccagtatcaatagctattctgtttctgatggttccaccagccgtagtagccgcagccgcaagaaactccgaaccactaaaaagaaaaagaaaggcgaggaggaggtgactgctgtggatggttatgagacagaccaccaggactattgcgaggtgtgccagcaaggcggtgagatcatcctgtgtgatacctgtccccgtgcttaccacatggtctgcctggatcccgacatggagaaggctcccgagggcaagtggagctgcccacactgcgagaaggaaggcatccagtgggaagctaaagaggacaattcggagggtgaggagatcctggaagaggttgggggagacctcgaagaggaggatgaccaccatatggaattctgtcgggtctgcaaggatggtggggaactgctctgctgtgatacctgtccttcttcctaccacatccactgcctgaatcccccacttccagagatccccaacggtgaatggctctgtccccgttgtacgtgtccagctctgaagggcaaagtgcagaagatcctaatctggaagtggggtcagccaccatctcccacaccagtgcctcggcctccagatgctgatcccaacacgccctccccaaagcccttggaggggcggccagagcggcagttctttgtgaaatggcaaggcatgtcttactggcactgctcctgggtttctgaactgcagctggagctgcactgtcaggtgatgttccgaaactatcagcggaagaatgatatggatgagccaccttctggggactttggtggtgatgaagagaaaagccgaaagcgaaagaacaaggaccctaaatttgcagagatggaggaacgcttctatcgctatgggataaaacccgagtggatgatgatccaccgaatcctcaaccacagtgtggacaagaagggccacgtccactacttgatcaagtggcgggacttaccttacgatcaggcttcttgggagagtgaggatgtggagatccaggattacgacctgttcaagcagagctattggaatcacagggagttaatgaggggtgaggaaggccgaccaggcaagaagctcaagaaggtgaagcttcggaagttggagaggcctccagaaacgccaacagttgatccaacagtgaagtatgagcgacagccagagtacctggatgctacaggtggaaccctgcacccctatcaaatggagggcctgaattggttgcgcttctcctgggctcagggcactgacaccatcttggctgatgagatgggccttgggaaaactgtacagacagcagtcttcctgtattccctttacaaggagggtcattccaaaggccccttcctagtgagcgcccctctttctaccatcatcaactgggagcgggagtttgaaatgtgggctccagacatgtatgtcgtaacctatgtgggtgacaaggacagccgtgccatcatccgagagaatgagttctcctttgaagacaatgccattcgtggtggcaagaaggcctcccgcatgaagaaagaggcatctgtgaaattccatgtgctgctgacatcctatgaattgatcaccattgacatggctattttgggctctattgattgggcctgcctcatcgtggatgaagcccatcggctgaagaacaatcagtctaagttcttccgggtattgaatggttactcactccagcacaagctgttgctgactgggacaccattacaaaacaatctggaagagttgtttcatctgctcaactttctcacccccgagaggttccacaatttggaaggttttttggaggagtttgctgacattgccaaggaggaccagataaaaaaactgcatgacatgctggggccgcacatgttgcggcggctcaaagccgatgtgttcaagaacatgccctccaagacagaactaattgtgcgtgtggagctgagccctatgcagaagaaatactacaagtacatcctcactcgaaattttgaagcactcaatgcccgaggtggtggcaaccaggtgtctctgctgaatgtggtgatggatcttaagaagtgctgcaaccatccatacctcttccctgtggctgcaatggaagctcctaagatgcctaatggcatgtatgatggcagtgccctaatcagagcatctgggaaattattgctgctgcagaaaatgctcaagaaccttaaggagggtgggcatcgtgtactcatcttttcccagatgaccaagatgctagacctgctagaggatttcttggaacatgaaggttataaatacgaacgcatcgatggtggaatcactgggaacatgcggcaagaggccattgaccgcttcaatgcaccgggtgctcagcagttctgcttcttgctttccactcgagctgggggccttggaatcaatctggccactgctgacacagttattatctatgactctgactggaacccccataatgacattcaggcctttagcagagctcaccggattgggcaaaataaaaaggtaatgatctaccggtttgtgacccgtgcgtcagtggaggagcgcatcacgcaggtggcaaagaagaaaatgatgctgacgcatctagtggtgcggcctgggctgggctccaagactggatctatgtccaaacaggagcttgatgatatcctcaaatttggcactgaggaactattcaaggatgaagccactgatggaggaggagacaacaaagagggagaagatagcagtgttatccactacgatgataaggccattgaacggctgctagaccgtaaccaggatgagactgaagacacagaattgcagggcatgaatgaatatttgagctcattcaaagtggcccagtatgtggtacgggaagaagaaatgggggaggaagaggaggtagaacgggaaatcattaaacaggaagaaagtgtggatcctgactactgggagaaattgctgcggcaccattatgagcagcagcaagaagatctagcccgaaatctgggcaaaggaaaaagaatccgtaaacaggtcaactacaatgatggctcccaggaggaccgagattggcaggacgaccagtccgacaaccagtccgattactcagtggcttcagaggaaggtgatgaagactttgatgaacgttcagaagctccccgtaggcccagtcgtaagggcctgcggaatgataaagataagccattgcctcctctgttggcccgtgttggtgggaatattgaagtacttggttttaatgctcgtcagcgaaaagcctttcttaatgcaattatgcgatatggtatgccacctcaggatgcttttactacccagtggcttgtaagagacctgcgaggcaaatcagagaaagagttcaaggcatatgtctctcttttcatgcggcatttatgtgagccgggggcagatggggctgagacctttgctgatggtgtcccccgagaaggcctgtctcgccagcatgtccttactagaattggtgttatgtctttgattcgcaagaaggttcaggagtttgaacatgttaatgggcgctggagcatgcctgaactggctgaggtggaggaaaacaagaagatgtcccagccagggtcaccctccccaaaaactcctacaccctccactccaggggacacgcagcccaacactcctgcacctgtcccacctgctgaagatgggataaaaatagaggaaaatagcctcaaagaagaagagagcatagaaggagaaaaggaggttaaatctacagcccctgagactgccattgagtgtacacaggcccctgcccctgcctcagaggatgaaaaggtcgttgttgaaccccctgagggagaggagaaagtggaaaaggcagaggtgaaggagagaacagaggaacctatggagacagagcccaaaggtgctgctgatgtagagaaggtggaggaaaagtcagcaatagatctgacccctattgtggtagaagacaaagaagagaagaaagaagaagaagagaaaaaagaggtgatgcttcagaatggagagacccccaaggacctgaatgatgagaaacagaagaaaaatattaaacaacgtttcatgtttaacattgcagatggtggttttactgagttgcactccctttggcagaatgaagagcgggcagccacagttaccaagaagacttatgagatctggcatcgacggcatgactactggctgctagccggcattataaaccatggctatgcccggtggcaagacatccagaatgacccacgctatgccatcctcaatgagcctttcaagggtgaaatgaaccgtggcaatttcttagagatcaagaataaatttctagctcgaaggtttaagctcttagaacaagctctggtgattgaggaacagctgcgccgggctgcttacttgaacatgtcagaagacccttctcacccttccatggccctcaacacccgctttgctgaggtggagtgtttggcggaaagtcatcagcacctgtccaaggagtcaatggcaggaaacaagccagccaatgcagtcctgcacaaagttctgaaacagctggaagaactgctgagtgacatgaaagctgatgtgactcgactcccagctaccattgcccgaattcccccagttgctgtgaggttacagatgtcagagcgtaacattctcagccgcctggcaaaccgggcacccgaacctaccccacagcaggtagcccagcagcagtgaagatgcagactgataccacctccaccgctgagcagtgaccttcctcactttctcttgtcccagcttctcccctgggggcctgagagaccctcaccttccttctgcccatcttccatgttgtaaaggaacagccccagtgcactgggggaggggagggagtgaggggcagtggtgcccttcctgcagaagagacatgcagcagtagcgctggcgccatctgcaggagctggcgggctggccttctggaccctggcttctccccactgtaacgcctgttacacacaaactgttgtgggttcctgccaggcttgaagaaaatgatctgaattttttcctccttttggttttattttgttggtttattttgtgttttcttttctcctttttggggggtattcagagtgggctgggcccctgggcgagacacagctacctctgttggcatctttttaataccaggaacccagcggctctagccactgagcggctaaatgaaataaagtggaaaaaaaaaaaaaggaaaaaaccaaaagcataaaaaaccacagcaaatttcttgatgaaaattgaaaataaaagtttccttgtattttaaaaaaaaaaaaaaa

SEQ ID NO: 2746 - DNA, 306 bp, Homo sapiens
atgtcagacgcagccgtagacaccagctccgaaatcaccaccgaggacttaaaggagaagaaggaagttgtggaagaggcggaaaatggaagagacgcccctgctgacgaggaaaatggggagcaagaggctgacaatgaagtagatgaagaacaggaagaaggtggggaggaagaaggtgatggtgaggaagaggatggagatgaagatgagggagctgagtcagctacggacaagcgggcagctgaagatgatgaggataacgatgtcgataccaagaagcagaagaccgacgaggatgactag

SEQ ID NO: 2747 - DNA, 3115 bp, Homo sapiens; identical to SEQ ID NO: 2604

SEQ ID NO: 2748 - DNA, 3913 bp, Homo sapiens; identical to SEQ ID NO: 268

SEQ ID NO: 2749 - DNA, 2546 bp, Homo sapiens
gacggcaaatggcggacttcgacacctacgacgatcgggcctacagcagcttcggcggcggcagagggtcccgcggcagtgctggtggccatggttcccgtagccagaaggagttgcccacagagcccccctacacagcatacgtaggaaatctacctttcaatacggttcagggcgacatagatgctatctttaaggatctcagcataaggagtgtacggctagtcagagacaaagacacagataaatttaaaggattctgctatgtagaattcgatgaagtggattcccttaaggaagccttgacatacgatggtgcactgttgggcgatcggtcacttcgtgtggacattgcagaaggcagaaaacaagataaaggtggctttggattcagaaaaggtggaccagatgacagaggaatgggtagctctcgagaatctagaggtggatgggattcccgggatgacttcaattctggcttcagggatgacttcttagggggcaggggaggtagtcgcccaggcgaccggcgaacaggcccccccatgggcagccgcttcagagatggccctcccctccgtggatccaacatggatttcagagaacccacagaagaggaaagagcacagagaccacgactccagcttaaacctcgaacagtcgcgacgcccctcaatcaagtagccaatcccaactctgctatcttcgggggtgccaggcctagagaggaagtcgttcaaaaggagcaagaatgagcctgcggttgggagggaatggggcgtggggggttagagcaggaccacagcctggtgagtccccgggcagccgtcctgcagccgccactcctgcgcctgccattggcctcctcacagcggaaacacagcttgtgagtgcatgtcagctgttaacaagtggtttttagtacattctgggctttgctgtatctatctagtgcctgtttgtgcgtttttttctttcttccgctgcttccccattttccttctgtcctttttctcctgctccttgttttcccagcagcacatggggttcctcggaggagcagaggtggccgccgtgggggggcgtttgggctgcggtgctgcgtcatttttcctttgctttctctttactttagacactggcccaactccaggcgtttcctttcattccctcagtgcttctcttctgacctgcatgttgagttctgtattgctggggcttccaacaaaaaccagagtcactgacagagggaacagcagagaccttgttggtattcagctgtgatggatatagagaatcagaggcaccttgttttcacaactaggataaaaatatctgcagggtcctttccattcctatttagagggagtcctggctccatgaccccctcccgagtggactgtccaagcagataggctcacacgagaaacagtgaggctgaaagggggggctatggaagagcggtagggagtccacggagaagatgcagtgaatgcttgcatgcattcacacgtgtgtgtgtcccagctagttcactcctttcgccgtgcgtggtggaggctggcctctctggctgggtgcagtgaatggccagcgggtttcttttctgctgggccaaggcgctttgggggtggagggggtggtgctggtgctgcactgggctgactgcggcgctgacgcagcgtttccccccatccctgttgcctgtgtgttgtgtggatctgttcctagtataggcaacataatgagatactgtgcttcccacctccccttcagttcagagccaaaatgggtctagaatctggcactttactcatttcctttgataaattgtactatgcagagctgtcaggaaccttcagatagcagtagaggactgcagctgtctaggtctgcggccacatcttggggacacactggactgttcccatgtgcagggttcagcagttatgtgggagtgctaggggttaggcttttgagcttgaacgcctgcgtgtgaacagatgaaaaatccttcagtacccaagtcccagtctgtcctatggggagcagtttgggggcggccggcagcaggagcctgggaaagaggccctcgccaggtgatggcagggccagggtggcctggggcacccagcggaatgtgcttagtatttggtcaccagccgtcatcctgggcttttcctactgtgtcttgttacaaggcctcagcaatccacagaactctctctccttccttccacctgtcagcttctctgcttctgagataagaaccatttgtgtaacaccaacacttaacttcagaaagacatgcattatgtggtgtaatcaaacccgatgctttcagatgacctacttacatcttcaatgtggataagataaagaacaaaacacatgcatctaaactgctgggcaatccagttgacttttaaatgtaagaatggaattccaaacacttaacacattcagctatatgacagaaagtaaatctatggatatggtattttgtgaatgatcttttaaataaaagaaaaccttacgtaatattt

SEQ ID NO: 2750 - DNA, 15534 bp, Homo sapiens; identical to SEQ ID NO: 791

SEQ ID NO: 2751 - DNA, 4337 bp, Homo sapiens
ggaggctgagcgggcggcgcgacgcgggggccgacgggggcgccgggtggccgcgccggaagtgccttgcgcggcagaggaagcgcagggacagagcggagcaggccgagccggcggaaagggtctttgctgctgcgcccgggcaggggctgccgcggccccaggtcccgcttcgagacgcggcgcggtccaggcgggaggcgactccctaggaagggacccggggcgggaggaggaagtgaggccgcgcggaaggaaggcggcgagccccggggccccgaggccttggccgcgtcacagcacccacatggcctctggagtgggcgcggccttcgaggaactgcctcacgacggcacgtgtgacgagtgcgagcccgacgaggctccgggggccgaggaagtgtgccgagaatgcggcttctgctactgccgccgccatgccgaggcgcacaggcagaagttcctcagtcaccatctggccgaatacgtccacggctcccaggcctggaccccgccagctgacggagagggggcggggaaggaagaagcggaggtcaaggtggagcaggagagggagatagaaagcgaggcaggggaagagagtgagtcggaggaagagagcgagtcagaggaagagagcgagacagaggaagagagtgaggatgagagcgatgaggagagtgaagaagacagcgaggaagaaatggaggatgagcaagaaagcgaggccgaagaagacaaccaagaagaaggggaatccgaggcggagggagaaactgaggcagaaagtgaatttgacccagaaatagaaatggaagcagagagagtggccaagaggaagtgtccggaccatgggcttgatttgagtacctattgccaggaagataggcagctcatctgtgtcctgtgtccagtcattggggctcaccagggccaccaactctccaccctagacgaagcctttgaagaattaagaagcaaagactcaggtggactgaaggccgctatgatcgaattggtggaaaggttgaagttcaagagctcagaccctaaagtaactcgggaccaaatgaagatgtttatacagcaggaatttaagaaagttcagaaagtgattgctgatgaggagcagaaggcccttcatctagtggacatccaagaggcaatggccacagctcatgtgactgagatactggcagacatccaatcccacatggataggttgatgactcagatggcccaagccaaggaacaacttgatacctctaatgaatcagctgagccaaaggcagagggcgatgaggaaggacccagtggtgccagtgaagaagaggacacatgaaggcttgctacccccagtggaaaatcatcccctccccttgtgtgtatgtgacagcgtgtatgtaacggcttctgatttctgtgaaagctgctcagcaacaaacgtacttccaccagatgtgtccccagatccacagcaggcacatatctctccaagggatgaccagttttatgcttactgtgtgcttctcatcccctggttgtggtaggtcaaggaaaagagcccctttgatccaccaggagcaattaagaaaggtccttcaggtaatccctcaatggctgctttgaacttactcaggaaagccagcccccataatattgtattaccaaacagtatcgctttgttaggaaggatctggaataatcttgaagggaagtcagagttttctccctgcctattaacaaaaacccaattttgttcatattgaagcatgaaataaatgagagcaaggtagggccaaattaactcttgtggacagtccctaaaagtccagttctacatttgtgaaaattgtggtgccatgaattaagatggatgactggaaaaaggtgttggagaaagagttaaagatgaggaagagatatttttagtatatgaagttatccaggacttgatattcataattcagtgctgtggaaatgaaaaaaatgattgaagaggtggaacggaaatgaccttagggggaaaaaaaaggaccaaagaagtctgattaaaagttgaaatcagtatttctgaattcaaattgcttgaatttccaaaatagtcagtaaaggatctaatagaaccagaattatttgggtgaattctgcaggttttatgggcttgtcacaacgtgaagggctggaatgtatattaccaaatgggaatttccattgtaggtttttgctagtcccacccccattttagcctaatttggcttaaacgcagtatggggagaattgttcccattccatgtgttctgaattcagctcatctcccagcatatagatatatcctcctttaactccgaccagaacccttcttcctgtggcactccccacccatagaccttcagatcatctcccacaccctggatctcactctcctcttagtaacagagacactcctgaggttggacttccttgcttttctctacttccaaatcacaatttcttacaaccaagctttgtgctcccgagtaagcagggatgtactaggggaatgtaaaactgcaaacttaaaaacctgcatcttcttgaagcatcagttttacttaccaaatggtttagagtcataagatgacctatttttatataaaagttatattatagaataaaatgttcatacgcatagactgttaagataaaaaaataggaatcttgcaaggtaattcttatttgcaagtgggttatgtgttcactctcctctacctttatggtattttggtgttcacttacgaagcatacaactagaaccatatccaagcagactctgggttgctgttaacccagggcctagacttctagtgcctctgaggcagaaccaaaggagcctgcactgggggaaatcccttttcctgcctgcctgtctgcctgtgacctgtgtacgtattacaggctttaggaccagctgattgttatgcttgcaggatggttttgaaacagaaacaatacttgtttactgtaggaatcctatttatattatttttcagtcctgtgaatgctgtgaaaagatttattcctttgaggccaggaagctcccaggcatatatgcttctaggttaggattgtcctgactcactaaagatgccaggatattggggctgaggggagtttgaggtgttaaaaaaaaaaaaaaaaaagcatttttctctcaaactgatggccaagaaatggctaggacaattttggtgctttacctatctctgcaaagactggagaatttggcataccattaattacaaccaccaatcatatccaacaaaagtaccctaaaagaaggaccagtggccactctcgaaaaaatttaagtatcagaagattaaaaagattttaggatttggaagcttgtattgtctttccccaataatcattgtttgatctccaaatagtagccttatattagcaatagacagatcattggttctccatatctgatcatatgttactactttgaatcagtatttgggaaattcaagcatttatgcagtggatataaatggaaatataaaaatatttgccaacctgtctcagtaacttatcatatctctgtgatcctcaaggaaagcacttttgcttttacttagaaagcgtttcagatttgctttatagactcctgctgtcttcagtacctgataaaactttaaccagggaagcattaaacacagtgcagcagcttttgcccaggcttctaagttcctgccggcagcatttatcaatgtaagaactaggatgcttcctgcagtggcactaccttcccctagagctggagcatgctgcttggccttaagccccagcatgatgaggcttccctcctgccaggtcagtaaaagttagagagctcagaattgggtcttgcctgggtgcaggtggcagggtttgctgaaacccctaaagagaagtcaccaagggaggcaggtaatgaatgtttccagaatcagtcggatactcatagcaatttctggctatctttcaaatgttgaatttctggatgctgagagggactttgatttgatatcattaaatccaggacagtcccaagaagtgcttggagtctcggctctgacagcccaagaagggaaataacttgtattaaggaacaactatgagccaggccctgagctgtctcttagataataaaacagatggggagtggaagagtcatttgcttcaagttatacagctaggaaatactcaagccaaatcttgaacgcagctccccctaattctgtggacaggcactttgtaccacacaccatggtccacctaaaaacagaaggataaaaagacttcaggtt

SEQ ID NO: 2752 - DNA, 8699 bp, Homo sapiens
cagccccggcaggatggcggcggacacgcaggtttccgagacactaaagcgttttgcagggaaggtgacaacagccagtgtaaaggaacggagagaaatcctcagtgaacttgggaagtgtgttgctggaaaagatcttccagagggagcagtgaaggggctctgcaaattgttctgcttgactctgcatcgatatagagatgcagcctcccgcagggccttgcaggcagccatccagcagttggctgaggcccagccagaagccactgctaagaaccttctacactctctgcagtcttctggtataggctccaaagcaggtgttcccagtaagagcagtggctctgccgccttgctggccttgacctggacctgcctcctggtgcgcattgtctttccatcgagagccaagcgacaaggagacatctggaacaaactggtggaagtgcagtgcctgctcttgctggaggtgctgggtggctcccacaagcacgccgtggatggtgctgtgaagaaactcacgaagctgtggaaagagaaccccgggctggtggaacagtacttgtcagccattctcagcctagagcccaaccagaactatgctggcatgctggggctgctggtgcagttctgcacgagtcacaaggagatggacgtggtcagtcagcacaagagcgccctactggacttttacatgaagaacatcctgatgagcaaagtcaagcctccgaagtacctgttggatagctgtgcccctctgctccgatacctgtcccactcagaatttaaggatctgatactgcccaccatacagaagtccttactgaggagtccagagaatgttattgaaactatttctagtctgctggcatcagtgacgcttgacctcagccagtatgccatggacatcgtgaaaggactggctggtcacctgaaatccaacagtccccgcctgatggatgaagctgtgctggcactgcggaacctggcacgccagtgcagtgactcttcggccatggaatccctgaccaagcacctatttgctatcctcggaggctcggaaggaaaactaactgttgtagcccagaagatgagcgtcctctcagggattgggagcgtcagtcatcacgtggtgtctggaccttccagtcaggtcctgaatgggatcgtggctgagctgttcatcccgttccttcagcaggaagttcatgaagggaccttggtacacgctgtctcagtcctggctctctggtgtaaccgattcactatggaagtgcccaagaagctcactgaatggttcaaaaaagctttcagccttaaaacctccacatctgcggtgaggcatgcctacctgcagtgcatgttggcctcttaccggggtgacacgctgttgcaggccctggacttactgcccttgctcatccagacagtggagaaggcagcctcccaaagcactcaggttcccaccatcactgaaggggttgccgcagccttgttgctcttaaagttgtcagtggctgactcacaggctgaggccaaactgagcagtttctggcagttgattgtggatgagaaaaagcaggttttcacttctgagaaattcctggtcatggcttcagaggatgccctgtgtactgtgttgcatctgacagagagacttttccttgaccacccgcatagactcactggcaacaaagttcagcagtaccaccgggctctggtggcggtgctcctgagccgcacctggcacgtccgcaggcaggctcagcagacagttcggaagctgctgtcctctcttgggggctttaagctggcgcacggactcttggaggagctgaagactgtcctcagttctcacaaggtgctgcccttagaggctttggtgactgatgctggagaggtgactgaggcaggcaaggcctacgtgcctccacgggtcctgcaggaggctctgtgtgtcatctccggtgtgccagggctcaagggtgatgtcaccgacactgaacaactggcccaggaaatgctgatcatctcccaccacccatccttagttgccgtgcagtctggactttggccagcacttcttgccaggatgaagatcgatcctgaagcctttatcaccaggcacctggatcagatcattcccaggatgaccacacagagtcccctaaaccagtcctccatgaatgccatgggctccctttccgtcctgtcgccggaccgggtcctcccacagctcatcagcaccatcactgcctccgtgcagaaccctgcactgcgcctggtgacgcgggaggagtttgccattatgcagacccctgctggggagctgtatgacaaatccatcattcagagtgcccagcaggacagcataaaaaaggccaacatgaagcgagagaacaaagcttattccttcaaagagcagatcatcgagctggagctgaaggaggagataaagaagaagaaaggcatcaaagaggaggtgcagctgaccagcaagcagaaggagatgctgcaggcccagctagacagggaggcgcaggtccggaggcggctgcaggagctggatggggagctggaggcggcgcttggactgctggacatcatcctggccaagaacccgtccggcctgacccagtacatccctgttttggtcgactcttttctgcccttgctgaagtctcccctggctgctcccaggatcaagaaccccttcttgtccttggctgcctgtgtcatgccctctaggctcaaggctttgggcactttggtgagccacgtgaccctgcgcctgctgaagccagagtgtgtcctggataagtcctggtgccaggaagagctgtcggtggctgtgaagagggcggtgatgctgctgcacacccacaccatcaccagcagggtgggcaagggggagccaggtgctgcgcccttgtccgcgccagccttctccttagtcttcccgtttctgaagatggtgctgacggagatgccccaccacagtgaggaggaggaggagtggatggcccagattcttcagatcctcactgtccaagcccagctgagggcctcccccaacaccccacccgggcgggtggacgagaatggcccggagttgctgcctcgcgtggccatgctgcgtcttctgacttgggtgatcgggacgggctcgcctcgcttacaggttctggcttcagacaccctgaccaccctgtgtgccagcagcagtggtgatgatggctgtgcctttgcagagcaggaggaggtggacgtgctgctctgtgccttgcagtccccgtgtgccagcgtgcgggaaaccgtgctccgggggctgatggaactccacatggtattgccagcacctgatactgatgagaagaatggcctgaaccttctgcggagactctgggtggtcaagtttgacaaggaggaggagatccggaagctggctgagaggctctggtcaatgatgggcctagacctgcagccagacctctgctccttgctgattgacgacgtgatctatcatgaggcggctgtaaggcaggcaggggccgaagccctctcccaagcagtggcacgttaccagcggcaggcggcggaggttatgggcaggctcatggagatttaccaggaaaagctctaccggccgcccccagtgctggatgctttgggacgagttatttcagaatctcctccagatcagtgggaagccaggtgtggcttggcgttggccctcaacaagctctcccagtatttggacagctctcaggtgaagccactctttcagttttttgtccctgatgccctcaatgaccgacacccagatgtccggaagtgcatgttggatgcagccctcgcaacgctcaacactcatgggaaggagaacgtcaactcgctgttgccagtattcgaggagttcctgaagaacgcgcccaatgatgccagctatgatgctgtgcgacagagtgtggtggtcctgatgggctctctggccaagcacctggacaagagtgaccccaaagtgaagcccattgttgccaagctcatcgctgccctctccaccccctcccagcaggtccaggagtccgtagccagctgcttgccaccccttgtgccagccatcaaggaggatgctggagggatgatccagaggcttatgcagcagctgctggagtcagacaagtacgcagagcgcaaaggggccgcctatggcctggcgggcctggtgaagggcctgggcatcctctcgctgaagcaacaggagatgatggcggcactgactgatgccatccaagataagaagaacttccgccggcgagagggagccctctttgccttcgagatgctctgcaccatgctggggaaactttttgagccgtatgtggttcacgtgctgccccatctgctcctgtgctttggggatggaaaccagtatgtgcgtgaggctgcagatgactgtgccaaggctgtgatgagcaacttgagtgctcacggggtgaagctggtgctcccctccttactggctgccctggaggaggaatcgtggcggaccaaagctgggtcagtggagcttcttggggcaatggcgtactgtgctcctaagcagctgtcatcctgtctacccaacattgtgcccaagcttacggaggtgctgaccgactcccatgtcaaagtccagaaggctggacagcaggcgctcaggcagatcggctccgttatcaggaacccggagatcctggccattgctccagtcctcctggatgccctgacggatccctccaggaagacccagaagtgcttgcagaccctgctggacaccaagtttgtccacttcattgatgccccatccctggccctcatcatgcccattgtccagagagccttccaggaccgttccacggacacgcggaagatggcagcccagattattggcaacatgtactccctgacagaccagaaggacttggctccgtacctgcccagcgtgacgcctggcctgaaagcatcgcttttggaccctgtgcctgaggtgcggaccgtatctgcaaaggcccttggggccatggtgaagggcatgggggagtcgtgctttgaggacttgctgccgtggctgatggagacactgacctatgagcagagctctgtggatcgctcaggcgctgcacaggggttggctgaggtcatggccggtttgggggtggagaagttggagaagttgatgccagaaatcgtggctacagccagcaaagtggacattgcaccccatgtccgagatggctacattatgatgtttaactacctgcccatcacctttggagacaagtttactccttatgtggggcccatcatcccctgtatcctcaaagctcttgctgatgagaatgagtttgtgcgtgacaccgccctgcgcgcgggccagcgggttatctccatgtacgctgagacagccatcgccctgctgctgccccagctagagcaaggcctctttgatgacctttggagaatcaggttcagctctgttcagctccttggggatctcctgtttcacatctcaggagtcactgggaagatgaccacagaaactgcctctgaggatgataactttggaactgcccagtccaacaaggcgatcatcactgccctgggggtagagcggcggaaccgggtgttggcagggctgtacatgggccgctcagacacccagctggtggtgcggcaggcgtccctgcatgtctggaagattgttgtctccaataccccccgcaccttgcgtgagatcctacccactctctttgggctcctgctgggtttcctggccagcacgtgtgcagataagagaacgattgcagcgagaacattgggagatcttgtgcggaagttaggggagaaaatcctccccgagatcatccccatccttgaggaaggcctgaggtctcagaagagcgatgagaggcagggtgtgtgcattggcctaagtgagatcatgaagtccaccagccgggatgccgtgctgtatttctctgaatccctcgtgcccacggcaaggaaggctttgtgtgacccactggaggaggtcagagaggcggcagccaagactttcgagcagctgcattccaccatcggccaccaggctctggaggacattctcccatttttactaaagcagctggatgacgaggaggtgtcagagtttgccttggatggtctgaagcaagtcatggctattaagagtcgtgtggtgctgccctaccttgtgcccaagctgacaacgccacctgtcaacacccgggtgctggctttcctttcgtcagtggctggtgatgccctcacccgtcatcttggcgtgatcctcccagcggtcatgctggccctgaaggaaaagcttgggaccccagatgagcagctggagatggccaattgtcaggctgtgatcctctccgtagaggatgacacagggcaccggatcatcatcgaggatctgctggaggccacccgcagccctgaggtgggcatgaggcaagctgctgccatcatcctcaacatctactgttcccgctcaaaggctgactacaccagccacctgcggagcctggtctcgggcctgatccgcctcttcaatgactccagccctgtggttctggaggagagctgggatgccctaaatgccatcactaagaagctggatgctggcaaccagttggcactcattgaagagctgcacaaggaaatccggctcatagggaacgagagcaaaggcgagcatgtgccaggattctgcctcccgaagaagggagtgacctccatccttccagtgttgcgggaaggagtcctgactggcagccctgagcagaaggaggaggcagccaaagccttaggcttggtaatccgcctgacctcggctgacgccctgaggccctccgtggtcagcatcactggccctctgatccgcatcctgggggacaggttcagctggaatgtgaaggcggctctgctcgagacactcagcctcttgttggctaaggttgggattgccctgaagcccttcctgccccagctgcagaccactttcaccaaagccctgcaggactccaaccggggggtgcgcctgaaggccgcagatgctctggggaagctcatttccatccacattaaggtggaccccctcttcacagagctgctcaatggcatccgcgccatggaggacccaggtgtcagggacaccatgctgcaggccctgaggtttgtgattcagggagcaggggccaaagtggatgccgtcatccggaaaaacatcgtctcactcctgctgagcatgctgggacacgatgaggacaacactcgcatctcctcagccgggtgcctaggggaactgtgtgcctttttgactgaagaggagcttagtgccgttctacagcagtgcttgctggcggacgtgtccggcattgactggatggttcggcacgggcggagcctggcactttccgtggctgtgaatgtggctcctggcagactttgtgccggcagatatagcagtgatgttcaggaaatgatcctgagcagtgccacggcggacaggatccccattgcggtgagcggggtccggggcatgggctttctcatgagacaccacatcgagacaggcggagggcagttgccggccaaactttccagcctgttcgttaagtgtctgcagaacccatccagcgacatcaggctggtggctgagaagatgatctggtgggcaaataaggacccactgcctcccctggacccccaggccatcaagcccatcctgaaggctcttcttgacaacaccaaggataagaacaccgtggtcagggcctacagcgaccaggcaattgtcaacctcctcaagatgcggcagggtgaagaggtgtttcagtccctctccaagatcctggatgtggccagtttggaggtgctgaacgaggttaaccgaaggtccctgaagaagctggccagccaggccgactccacggagcaggtggacgacaccatcctgacatgagaggcctgggccagcagcagcattgccgctccacatctttgctcaatgttttcatttttgaaaatacatttgttccaatggggagcttggaagatggcgttcccagaaagtattttaatatcaatagaccacagccaaagccttaaatcaaacccacacacaactgaaaattgcctcctccatctctcaccttttcctgtggagaagagaaggaaaagcacacgcatgcgcctcagcaaatggcagcccaggagctgtttgtccagtttagcatggctaggtctggaactataatagcagggtcagactgtgggttcctcttctcctgtgcttgagctctggtttgagagctggcgctaccaacctttttcctatatcccgagtggggcacagacggtggatctctgcccagtgtggtgtgtctggcttggcttttcaatattgtgaggtctgaatggatctgacccctgtcagatgaaaatgattcacagctctggcagttcccaagtctggggaggggtataggtttgaaaggctgtttgaaagaggaatgtttaataaaggctttgatttaatcttgatataaacagatttttaaaaatctccacccattaaacatgaagcttcctgcatcaggaaaaaaaaaaaaaaaaaaaaaaaaaaaaaaaaa
